(19) United States
(12) Patent Application Publication
(10) Pub. No.: US 2026/0184782 A1
(43) Pub. Date: Jul. 2, 2026

(54) VARIANT NUCLEIC ACID LIBRARIES FOR TIGIT

(71) Applicant: Twist Bioscience Corporation, South San Francisco, CA (US)

(72) Inventor: Aaron SATO, South San Francisco, CA (US)

(73) Assignee: Twist Bioscience Corporation, South San Francisco, CA (US)

(21) Appl. No.: 19/113,912

(22) PCT Filed: Sep. 22, 2023
(86) PCT No.: PCT/US2023/033428

§ 371 Date: Mar. 21, 2025

Related U.S. Application Data
(60) Provisional application No. 63/376,969, filed on Sep. 23, 2022.
(60) Provisional application No. 63/493,254, filed on Mar. 30, 2023.

(51) Int. Cl. C07K 16/28

(52) U.S. Cl. CPC C07K 16/2803; C07K 2317/52; C07K 2317/569; C07K 2317/92

(57) ABSTRACT

Provided herein are methods and compositions relating to TIGIT libraries having nucleic acids encoding for a scaffold comprising a TIGIT domain. TIGIT libraries described herein encode for immunoglobulins such as antibodies.

### BACKGROUND

[0001] TIGIT (formally known as T cell immunoreceptor with immunoglobulin and ITIM domains) regulates T-cell mediated immunity. TIGIT has been implicated in various diseases and disorders and therapeutic antibodies targeting TIGIT have clinical significance. Antibodies possess the capability to bind with high specificity and affinity to biological targets. However, the design of therapeutic antibodies is challenging due to balancing of immunological effects with efficacy. Thus, there is a need to develop compositions and methods for generation of antibodies for use in therapeutics.

### INCORPORATION BY REFERENCE

[0002] All publications, patents, and patent applications mentioned in this specification are herein incorporated by reference to the same extent as if each individual publication, patent, or patent application was specifically and individually indicated to be incorporated by reference.

### BRIEF SUMMARY

[0003] Provided herein are antibodies or antibody fragments comprising an amino acid sequence at least about 90% identical to that set forth in any one of SEQ ID NOs: 2239-3096. In some embodiments, the antibody or antibody fragment comprises an amino acid sequence at least about 95% identical to that set forth in any one of SEQ ID NOs: 2239-3096. In some embodiments, the antibody is a monoclonal antibody, a polyclonal antibody, a bi-specific antibody, a multispecific antibody, a grafted antibody, a human antibody, a humanized antibody, a synthetic antibody, a chimeric antibody, a camelized antibody, a single-chain Fvs (scFv), a single chain antibody, a Fab fragment, a F(ab′)2 fragment, a Fd fragment, a Fv fragment, a single-domain antibody, an isolated complementarity determining region (CDR), a diabody, a fragment comprised of only a single monomeric variable domain, disulfide-linked Fvs (sdFv), an intrabody, an anti-idiotypic (anti-Id) antibody, or ab antigen-binding fragments thereof. In some embodiments, the antibody or antibody fragment binds to TIGIT with a K_{D} of less than 75 nM. In some embodiments, the antibody or antibody fragment binds to TIGIT with a K_{D} of less than 50 nM. In some embodiments, the antibody or antibody fragment binds to TIGIT with a K_{D} of less than 25 nM. In some embodiments, the antibody or antibody fragment binds to TIGIT with a K_{D} of less than 10 nM.

[0004] Further provided herein are antibodies or antibody fragments that bind TIGIT, comprising an immunoglobulin heavy chain comprising an amino acid sequence at least about 90% identical to that set forth in any one of SEQ ID NOs: 2555-2636 or 2883-3096. In some embodiments, wherein the immunoglobulin heavy chain comprises an amino acid sequence at least about 95% identical to that set forth in any one of SEQ ID NOs: 2555-2636 or 2883-3096. In some embodiments, the immunoglobulin heavy chain comprises an amino acid sequence as set forth in any one of SEQ ID NOs: 2555-2636 or 2883-3096.

[0005] In some embodiments, the antibody is a monoclonal antibody, a polyclonal antibody, a bi-specific antibody, a multispecific antibody, a grafted antibody, a human antibody, a humanized antibody, a synthetic antibody, a chimeric antibody, a camelized antibody, a single-chain Fvs (scFv), a single chain antibody, a Fab fragment, a F(ab′)2 fragment, a Fd fragment, a Fv fragment, a single-domain antibody, an isolated complementarity determining region (CDR), a diabody, a fragment comprised of only a single monomeric variable domain, disulfide-linked Fvs (sdFv), an intrabody, an anti-idiotypic (anti-Id) antibody, or ab antigen-binding fragments thereof. In some embodiments, the antibody or antibody fragment thereof is chimeric or humanized. the antibody or antibody fragment thereof is chimeric or humanized. In some embodiments, the antibody or antibody fragment binds to TIGIT with a K_{D} of less than 75 nM. In some embodiments, the antibody or antibody fragment binds to TIGIT with a K_{D} of less than 50 nM. In some embodiments, the antibody or antibody fragment binds to TIGIT with a K_{D} of less than 25 nM. In some embodiments, the antibody or antibody fragment binds to TIGIT with a K_{D} of less than 10 nM.

[0006] Provided herein are methods of treating cancer comprising administering the antibodies or antibody fragments described herein. Provided herein are methods of treating a viral infection comprising administering the antibodies or antibody fragments described herein.

### BRIEF DESCRIPTION OF THE DRAWINGS

[0007] FIG. 1 presents a diagram of steps demonstrating an exemplary process workflow for gene synthesis as disclosed herein.

[0008] FIG. 2 illustrates an example of a computer system.

[0009] FIG. 3 is a block diagram illustrating an architecture of a computer system.

[0010] FIG. 4 is a diagram demonstrating a network configured to incorporate a plurality of computer systems, a plurality of cell phones and personal data assistants, and Network Attached Storage (NAS).

[0011] FIG. 5 is a block diagram of a multiprocessor computer system using a shared virtual address memory space.

[0012] FIGS. 6-7 depicts a graph of TIGIT affinity distribution for the VHH libraries, depicting either the affinity threshold (monovalent KD) from 20 to 4000 (FIG. 6) or the affinity threshold (monovalent KD) from 20 to 1000 (FIG. 7). Out of 140 VHH binders, 51 variants were <100 nM and 90 variants were <200 nM.

[0013] FIGS. 8A-8C depict graphs of CDR3 counts per length for ‘VHH library,’ (FIG. 8A) ‘VHH shuffle’ library (FIG. 8B), and ‘VHH hShuffle library’ (FIG. 8C).

[0014] FIG. 9 depicts a graph of a TIGIT:CD155 blockade assay for TIGIT VHH Fc binders. Concentration of the TIGIT VHH Fc binders in nanomolar (nM) is on the x-axis and relative HRP signal is on the y-axis.

[0015] FIG. 10A depicts a schema of the VHH libraries described herein.

[0016] FIG. 10B depicts a schema of design of phage-displayed hyperimmune libraries generated herein.

[0017] FIGS. 11A-11B depict heavy chain CDR length distribution of the hyperimmune libraries as assessed by next generation sequencing. FIG. 11A depicts a graph of CDR3 counts per length. FIG. 11B depicts graphs of CDRH1, CDRH2, and CDRH3 lengths.

[0018] FIG. 12 depicts a schema of the workflow of selection of soluble protein targets.

[0019] FIGS. 13A-13D depict graphs of data from hTIGIT ELISA after Round 3 and Round 4 of panning.

[0020] FIGS. 13E-13F depict schemas of CDRH3 length, yield, and affinity (K_{D}) for the hTIGIT immunoglobulins.

[0021] FIGS. 14A-14AA depict median fluorescence intensity from flow cytometry data.

[0022] FIGS. 15A-15C depict an outline of panning steps. FIG. 15A outlines a panning experiment using a structural library. FIG. 15B outlines another panning experiment using a structural library. FIG. 15C outlines another panning experiment using both a NAL library and a structural library (SAB).

[0023] FIGS. 16A-16G shows the results of ELISA positive assays with an antigen/BSA ratio of >3.0. FIG. 16A shows a summary of ELISA results for panning rounds 3-5. FIG. 16B shows the ELISA results of round 3 panning. FIG. 16C shows another set of ELISA results of round 3 panning. FIG. 16D shows the ELISA results of round 4 panning. FIG. 16E shows another set of ELISA results of round 4 panning. FIG. 16F shows the ELISA results of round 5 panning. FIG. 16G shows another set of ELISA results of round 5 panning.

### DETAILED DESCRIPTION

[0024] The present disclosure employs, unless otherwise indicated, conventional molecular biology techniques, which are within the skill of the art. Unless defined otherwise, all technical and scientific terms used herein have the same meaning as is commonly understood by one of ordinary skill in the art.

### Definitions

[0025] Throughout this disclosure, various embodiments are presented in a range format. It should be understood that the description in range format is merely for convenience and brevity and should not be construed as an inflexible limitation on the scope of any embodiments. Accordingly, the description of a range should be considered to have specifically disclosed all the possible subranges as well as individual numerical values within that range to the tenth of the unit of the lower limit unless the context clearly dictates otherwise. For example, description of a range such as from 1 to 6 should be considered to have specifically disclosed subranges such as from 1 to 3, from 1 to 4, from 1 to 5, from 2 to 4, from 2 to 6, from 3 to 6 etc., as well as individual values within that range, for example, 1.1, 2, 2.3, 5, and 5.9. This applies regardless of the breadth of the range. The upper and lower limits of these intervening ranges may independently be included in the smaller ranges, and are also encompassed within the disclosure, subject to any specifically excluded limit in the stated range. Where the stated range includes one or both of the limits, ranges excluding either or both of those included limits are also included in the disclosure, unless the context clearly dictates otherwise.

[0026] The terminology used herein is for the purpose of describing particular embodiments only and is not intended to be limiting of any embodiment. As used herein, the singular forms “a,” “an” and “the” are intended to include the plural forms as well, unless the context clearly indicates otherwise. It will be further understood that the terms “comprises” and/or “comprising,” when used in this specification, specify the presence of stated features, integers, steps, operations, elements, and/or components, but do not preclude the presence or addition of one or more other features, integers, steps, operations, elements, components, and/or groups thereof. As used herein, the term “and/or” includes any and all combinations of one or more of the associated listed items.

[0027] Unless specifically stated or obvious from context, as used herein, the term “about” in reference to a number or range of numbers is understood to mean the stated number and numbers +/−10% thereof, or 10% below the lower listed limit and 10% above the higher listed limit for the values listed for a range.

[0028] Unless specifically stated, as used herein, the term “nucleic acid” encompasses double- or triple-stranded nucleic acids, as well as single-stranded molecules. In double- or triple-stranded nucleic acids, the nucleic acid strands need not be coextensive (i.e., a double-stranded nucleic acid need not be double-stranded along the entire length of both strands). Nucleic acid sequences, when provided, are listed in the 5′ to 3′ direction, unless stated otherwise. Methods described herein provide for the generation of isolated nucleic acids. Methods described herein additionally provide for the generation of isolated and purified nucleic acids. A “nucleic acid” as referred to herein can comprise at least 5, 10, 20, 30, 40, 50, 60, 70, 80, 90, 100, 125, 150, 175, 200, 225, 250, 275, 300, 325, 350, 375, 400, 425, 450, 475, 500, 600, 700, 800, 900, 1000, 1100, 1200, 1300, 1400, 1500, 1600, 1700, 1800, 1900, 2000, or more bases in length. Moreover, provided herein are methods for the synthesis of any number of polypeptide-segments encoding nucleotide sequences, including sequences encoding non-ribosomal peptides (NRPs), sequences encoding non-ribosomal peptide-synthetase (NRPS) modules and synthetic variants, polypeptide segments of other modular proteins, such as antibodies, polypeptide segments from other protein families, including non-coding DNA or RNA, such as regulatory sequences e.g. promoters, transcription factors, enhancers, siRNA, shRNA, RNAi, miRNA, small nucleolar RNA derived from microRNA, or any functional or structural DNA or RNA unit of interest. The following are non-limiting examples of polynucleotides: coding or non-coding regions of a gene or gene fragment, intergenic DNA, loci (locus) defined from linkage analysis, exons, introns, messenger RNA (mRNA), transfer RNA, ribosomal RNA, short interfering RNA (siRNA), short-hairpin RNA (shRNA), micro-RNA (miRNA), small nucleolar RNA, ribozymes, complementary DNA (cDNA), which is a DNA representation of mRNA, usually obtained by reverse transcription of messenger RNA (mRNA) or by amplification; DNA molecules produced synthetically or by amplification, genomic DNA, recombinant polynucleotides, branched polynucleotides, plasmids, vectors, isolated DNA of any sequence, isolated RNA of any sequence, nucleic acid probes, and primers. cDNA encoding for a gene or gene fragment referred herein may comprise at least one region encoding for exon sequences without an intervening intron sequence in the genomic equivalent sequence.

### Antibody Libraries

[0029] Provided herein are methods, compositions, and systems for generation of antibodies for TIGIT. Methods, compositions, and systems described herein for the optimization of antibodies comprise a ratio-variant approach that mirror the natural diversity of antibody sequences. In some instances, libraries of optimized antibodies comprise variant antibody sequences. In some instances, the variant antibody sequences are designed comprising variant CDR regions. In some instances, the variant antibody sequences comprising variant CDR regions are generated by shuffling the natural CDR sequences in a llama, humanized, or chimeric framework. In some instances, such libraries are synthesized, cloned into expression vectors, and translation products (antibodies) evaluated for activity. In some instances, fragments of sequences are synthesized and subsequently assembled. In some instances, expression vectors are used to display and enrich desired antibodies, such as phage display. In some instances, the phage vector is a Fab phagemid vector. Selection pressures used during enrichment in some instances includes binding affinity, toxicity, immunological tolerance, stability, or other factor. Such expression vectors allow antibodies with specific properties to be selected (“panning”), and subsequent propagation or amplification of such sequences enriches the library with these sequences. Panning rounds can be repeated any number of times, such as 1, 2, 3, 4, 5, 6, 7, or more than 7 rounds. In some instances, each round of panning involves a number of washes. In some instances, each round of panning involves at least or about 1, 2, 3, 4, 5, 6, 7, 8, 9, 10, 11, 12, 13, 14, 15, 16, or more than 16 washes.

[0030] Described herein are methods and systems of in-silico library design. Libraries as described herein, in some instances, are designed based on a database comprising a variety of antibody sequences. In some instances, the database comprises a plurality of variant antibody sequences against various targets. In some instances, the database comprises at least 100, 500, 1000, 1500, 2000, 2500, 3000, 3500, 4000, 4500, 5000, or more than 5000 antibody sequences. An exemplary database is an iCAN database. In some instances, the database comprises naïve and memory B-cell receptor sequences. In some instances, the naïve and memory B-cell receptor sequences are human, mouse, or primate sequences. In some instances, the naïve and memory B-cell receptor sequences are human sequences. In some instances, the database is analyzed for position specific variation. In some instances, antibodies described herein comprise position specific variations in CDR regions. In some instances, the CDR regions comprise multiple sites for variation.

[0031] Described herein are libraries comprising variation in a CDR region. In some instances, the CDR is CDR1, CDR2, or CDR3 of a variable domain of heavy chain. In some instances, the CDR is CDR1, CDR2, or CDR3 of a variable domain of light chain. In some instances, the libraries comprise multiple variants encoding for CDR1, CDR2, or CDR3. In some instances, the libraries as described herein encode for at least 50, 100, 200, 300, 400, 500, 1000, 1200, 1500, 1700, 2000, 2500, 3000, 3500, 4000, 4500, 5000, or more than 5000 CDR1 sequences. In some instances, the libraries as described herein encode for at least 50, 100, 200, 300, 400, 500, 1000, 1200, 1500, 1700, 2000, 2500, 3000, 3500, 4000, 4500, 5000, or more than 5000 CDR2 sequences. In some instances, the libraries as described herein encode for at least 50, 100, 200, 300, 400, 500, 1000, 1200, 1500, 1700, 2000, 2500, 3000, 3500, 4000, 4500, 5000, or more than 5000 CDR3 sequences. In-silico antibodies libraries are in some instances synthesized, assembled, and enriched for desired sequences.

[0032] Following synthesis of CDR1 variants, CDR2 variants, and CDR3 variants, in some instances, the CDR1 variants, the CDR2 variants, and the CDR3 variants are shuffled to generate a diverse library. In some instances, the diversity of the libraries generated by methods described herein have a theoretical diversity of at least or about 10⁷, 10⁸, 10⁹, 10¹⁰, 10¹¹, 10¹², 10¹³, 10¹⁴, 10¹⁵, 10¹⁶, 10¹⁷, 10¹⁸, or more than 10¹⁸ sequences. In some instances, the library has a final library diversity of at least or about 10⁷, 10⁸, 10⁹, 10¹⁰, 10¹¹, 10¹², 10¹³, 10¹⁴, 10¹⁵, 10¹⁶, 10¹⁷, 10¹⁸, or more than 10¹⁸ sequences.

[0033] The germline sequences corresponding to a variant sequence may also be modified to generate sequences in a library. For example, sequences generated by methods described herein comprise at least 1, 2, 3, 4, 5, 6, 7, 8, 9, 10, 11, 12, 13, 14, 15, 16, or more than 16 mutations from the germline sequence. In some instances, sequences generated comprise no more than 1, 2, 3, 4, 5, 6, 7, 8, 9, 10, 11, 12, 13, 14, 15, 16, or no more than 18 mutations from the germline sequence. In some instances, sequences generated comprise about 1, 2, 3, 4, 5, 6, 7, 8, 9, 10, 11, 12, 13, 14, 15, 16, or about 18 mutations relative to the germline sequence.

### Antibody Libraries

[0034] Provided herein are libraries generated from methods described herein. Antibodies described herein result in improved functional activity, structural stability, expression, specificity, or a combination thereof. In some instances, the antibody is a single domain antibody. In some instances, the single domain antibody comprises one variable domain of heavy chain. In some instances, the single domain antibody is a VHH antibody.

[0035] As used herein, the term antibody will be understood to include proteins having the characteristic two-armed, Y-shape of a typical antibody molecule as well as one or more fragments of an antibody that retain the ability to specifically bind to an antigen. Exemplary antibodies include, but are not limited to, a monoclonal antibody, a polyclonal antibody, a bi-specific antibody, a multispecific antibody, a grafted antibody, a human antibody, a humanized antibody, a synthetic antibody, a chimeric antibody, a camelized antibody, a single-chain Fvs (scFv) (including fragments in which the VL and VH are joined using recombinant methods by a synthetic or natural linker that enables them to be made as a single protein chain in which the VL and VH regions pair to form monovalent molecules, including single chain Fab and scFab), a single chain antibody, a Fab fragment (including monovalent fragments comprising the VL, VH, CL, and CH1 domains), a F(ab′)2 fragment (including bivalent fragments comprising two Fab fragments linked by a disulfide bridge at the hinge region), a Fd fragment (including fragments comprising the VH and CH1 fragment), a Fv fragment (including fragments comprising the VL and VH domains of a single arm of an antibody), a single-domain antibody (dAb or sdAb) (including fragments comprising a VH domain), an isolated complementarity determining region (CDR), a diabody (including fragments comprising bivalent dimers such as two VL and VH domains bound to each other and recognizing two different antigens), a fragment comprised of only a single monomeric variable domain, disulfide-linked Fvs (sdFv), an intrabody, an anti-idiotypic (anti-Id) antibody, or ab antigen-binding fragments thereof. In some instances, the libraries disclosed herein comprise nucleic acids encoding for an antibody, wherein the antibody is a Fv antibody, including Fv antibodies comprised of the minimum antibody fragment which contains a complete antigen-recognition and antigen-binding site. In some embodiments, the Fv antibody consists of a dimer of one heavy chain and one light chain variable domain in tight, non-covalent association, and the three hypervariable regions of each variable domain interact to define an antigen-binding site on the surface of the VH-VL dimer. In some embodiments, the six hypervariable regions confer antigen-binding specificity to the antibody. In some embodiments, a single variable domain (or half of an Fv comprising only three hypervariable regions specific for an antigen, including single domain antibodies isolated from camelid animals comprising one variable domain of heavy chain such as VHH antibodies or nanobodies) has the ability to recognize and bind antigen. In some instances, the libraries disclosed herein comprise nucleic acids encoding for an antibody, wherein the antibody is a single-chain Fv or scFv, including antibody fragments comprising a VH, a VL, or both a VH and VL domain, wherein both domains are present in a single polypeptide chain. In some embodiments, the Fv polypeptide further comprises a polypeptide linker between the VH and VL domains allowing the scFv to form the desired structure for antigen binding. In some instances, a scFv is linked to the Fc fragment or a VHH is linked to the Fc fragment (including minibodies). In some instances, the antibody comprises immunoglobulin molecules and immunologically active fragments of immunoglobulin molecules, e.g., molecules that contain an antigen binding site. Immunoglobulin molecules are of any type (e.g., IgG, IgE, IgM, IgD, IgA and IgY), class (e.g., IgG 1, IgG 2, IgG 3, IgG 4, IgA 1 and IgA 2) or subclass.

[0036] In some embodiments, libraries comprise immunoglobulins that are adapted to the species of an intended therapeutic target. Generally, these methods include “mammalization” and comprises methods for transferring donor antigen-binding information to a less immunogenic mammal antibody acceptor to generate useful therapeutic treatments. In some instances, the mammal is mouse, rat, equine, sheep, cow, primate (e.g., chimpanzee, baboon, gorilla, orangutan, monkey), dog, cat, pig, donkey, rabbit, and human. In some instances, provided herein are libraries and methods for felinization and caninization of antibodies.

[0037] “Humanized” forms of non-human antibodies can be chimeric antibodies that contain minimal sequence derived from the non-human antibody. A humanized antibody is generally a human antibody (recipient antibody) in which residues from one or more CDRs are replaced by residues from one or more CDRs of a non-human antibody (donor antibody). The donor antibody can be any suitable non-human antibody, such as a mouse, rat, rabbit, chicken, or non-human primate antibody having a desired specificity, affinity, or biological effect. In some instances, selected framework region residues of the recipient antibody are replaced by the corresponding framework region residues from the donor antibody. Humanized antibodies may also comprise residues that are not found in either the recipient antibody or the donor antibody. In some instances, these modifications are made to further refine antibody performance.

[0038] “Caninization” can comprise a method for transferring non-canine antigen-binding information from a donor antibody to a less immunogenic canine antibody acceptor to generate treatments useful as therapeutics in dogs. In some instances, caninized forms of non-canine antibodies provided herein are chimeric antibodies that contain minimal sequence derived from non-canine antibodies. In some instances, caninized antibodies are canine antibody sequences (“acceptor” or “recipient” antibody) in which hypervariable region residues of the recipient are replaced by hypervariable region residues from a non-canine species (“donor” antibody) such as mouse, rat, rabbit, cat, dogs, goat, chicken, bovine, horse, llama, camel, dromedaries, sharks, non-human primates, human, humanized, recombinant sequence, or an engineered sequence having the desired properties. In some instances, framework region (FR) residues of the canine antibody are replaced by corresponding non-canine FR residues. In some instances, caninized antibodies include residues that are not found in the recipient antibody or in the donor antibody. In some instances, these modifications are made to further refine antibody performance. The caninized antibody may also comprise at least a portion of an immunoglobulin constant region (Fc) of a canine antibody.

[0039] “Felinization” can comprise a method for transferring non-feline antigen-binding information from a donor antibody to a less immunogenic feline antibody acceptor to generate treatments useful as therapeutics in cats. In some instances, felinized forms of non-feline antibodies provided herein are chimeric antibodies that contain minimal sequence derived from non-feline antibodies. In some instances, felinized antibodies are feline antibody sequences (“acceptor” or “recipient” antibody) in which hypervariable region residues of the recipient are replaced by hypervariable region residues from a non-feline species (“donor” antibody) such as mouse, rat, rabbit, cat, dogs, goat, chicken, bovine, horse, llama, camel, dromedaries, sharks, non-human primates, human, humanized, recombinant sequence, or an engineered sequence having the desired properties. In some instances, framework region (FR) residues of the feline antibody are replaced by corresponding non-feline FR residues. In some instances, felinized antibodies include residues that are not found in the recipient antibody or in the donor antibody. In some instances, these modifications are made to further refine antibody performance. The felinized antibody may also comprise at least a portion of an immunoglobulin constant region (Fc) of a felinize antibody.

[0040] Methods as described herein may be used for generation of libraries encoding a non-immunoglobulin. In some instances, the libraries comprise antibody mimetics. Exemplary antibody mimetics include, but are not limited to, anticalins, affilins, affibody molecules, affimers, affitins, alphabodies, avimers, atrimers, DARPins, fynomers, Kunitz domain-based proteins, monobodies, anticalins, knottins, armadillo repeat protein-based proteins, and bicyclic peptides.

[0041] Libraries described herein comprising nucleic acids encoding for an antibody comprise variations in at least one region of the antibody. Exemplary regions of the antibody for variation include, but are not limited to, a complementarity-determining region (CDR), a variable domain, or a constant domain. In some instances, the CDR is CDR1, CDR2, or CDR3. In some instances, the CDR is a heavy domain including, but not limited to, CDRH1, CDRH2, and CDRH3. In some instances, the CDR is a light domain including, but not limited to, CDRL1, CDRL2, and CDRL3. In some instances, the variable domain is variable domain of light chain (VL) or variable domain of heavy chain (VH). In some instances, the CDR1, CDR2, or CDR3 is of a variable domain of light chain (VL). CDR1, CDR2, or CDR3 of a variable domain of light chain (VL) can be referred to as CDRL1, CDRL2, or CDRL3, respectively. CDR1, CDR2, or CDR3 of a variable domain of heavy chain (VH) can be referred to as CDRH1, CDRH2, or CDRH3, respectively. In some instances, the VL domain comprises kappa or lambda chains. In some instances, the constant domain is constant domain of light chain (CL) or constant domain of heavy chain (CH).

[0042] Provided herein are libraries comprising nucleic acids encoding for an antibody comprising variation in at least one region of the antibody, wherein the region is the CDR region. In some instances, the antibody is a single domain antibody comprising one variable domain of heavy chain such as a VHH antibody. In some instances, the VHH antibody comprises variation in one or more CDR regions. In some instances, the VHH libraries described herein comprise at least or about 100, 200, 300, 400, 500, 600, 700, 800, 900, 1000, 1200, 1400, 1600, 1800, 2000, 2400, 2600, 2800, 3000, or more than 3000 sequences of a CDR1, CDR2, or CDR3. For example, the libraries comprise at least 2000 sequences of a CDR1, at least 1200 sequences for CDR2, and at least 1600 sequences for CDR3. In some instances, each sequence is non-identical.

[0043] Libraries as described herein may comprise varying lengths of a CDRH1, CDRH2, CDRH3, CDRL1, CDRL2, CDRL3, or combinations thereof of amino acids when translated. In some instances, the length of the CDRH1, CDRH2, CDRH3, CDRL1, CDRL2, CDRL3, or combinations thereof of amino acids when translated is at least or about 5, 6, 7, 8, 9, 10, 11, 12, 13, 14, 15, 16, 17, 18, 19, 20, 21, 22, 23, 24, 25, 26, 27, 28, 29, 30, or more than 30 amino acids.

[0044] Libraries comprising nucleic acids encoding for antibodies having variant CDR sequences as described herein comprise various lengths of amino acids when translated. In some instances, the length of each of the amino acid fragments or average length of the amino acid synthesized may be at least or about 15, 20, 25, 30, 35, 40, 45, 50, 55, 60, 65, 70, 75, 80, 85, 90, 95, 100, 105, 110, 115, 120, 125, 130, 135, 140, 145, 150, or more than 150 amino acids. In some instances, the length of the amino acid is about 15 to 150, 20 to 145, 25 to 140, 30 to 135, 35 to 130, 40 to 125, 45 to 120, 50 to 115, 55 to 110, 60 to 110, 65 to 105, 70 to 100, or 75 to 95 amino acids. In some instances, the length of the amino acid is about 22 amino acids to about 75 amino acids. In some instances, the antibodies comprise at least or about 100, 200, 300, 400, 500, 600, 700, 800, 900, 1000, 2000, 3000, 4000, 5000, or more than 5000 amino acids. In some instances, the library is a VHH library. In some instances, the library is an antibody library.

[0045] Libraries as described herein encoding for a VHH antibody comprise variant CDR sequences that are shuffled to generate a library with a theoretical diversity of at least or about 10⁷, 10⁸, 10⁹, 10¹⁰, 10¹¹, 10¹², 10¹³, 10¹⁴, 10¹⁵, 10¹⁶, 10¹⁷, 10¹⁸, or more than 10¹⁸ sequences. In some instances, the library has a final library diversity of at least or about 10⁷, 10⁸, 10⁹, 10¹⁰, 10¹¹, 10¹², 10¹³, 10¹⁴, 10¹⁵, 10¹⁶, 10¹⁷, 10¹⁸, or more than 10¹⁸ sequences.

[0046] Libraries as described herein encoding for an antibody or immunoglobulin comprise variant CDR sequences that are shuffled to generate a library with a theoretical diversity of at least or about 10⁷, 10⁸, 10⁹, 10¹⁰, 10¹¹, 10¹², 10¹³, 10¹⁴, 10¹⁵, 10¹⁶, 10¹⁷, 10¹⁸, or more than 10¹⁸ sequences. In some instances, the library has a final library diversity of at least or about 10⁷, 10⁸, 10⁹, 10¹⁰, 10¹¹, 10¹², 10¹³, 10¹⁴, 10¹⁵, 10¹⁶, 10¹⁷, 10¹⁸, or more than 10¹⁸ sequences.

[0047] Methods described herein provide for synthesis of libraries comprising nucleic acids encoding an antibody or immunoglobulin, wherein each nucleic acid encodes for a predetermined variant of at least one predetermined reference nucleic acid sequence. In some cases, the predetermined reference sequence is a nucleic acid sequence encoding for a protein, and the variant library comprises sequences encoding for variation of at least a single codon such that a plurality of different variants of a single residue in the subsequent protein encoded by the synthesized nucleic acid are generated by standard translation processes. In some instances, the antibody library comprises varied nucleic acids collectively encoding variations at multiple positions. In some instances, the variant library comprises sequences encoding for variation of at least a single codon of a CDRH1, CDRH2, CDRH3, CDRL1, CDRL2, CDRL3, VL, or VH domain. In some instances, the variant library comprises sequences encoding for variation of multiple codons of a CDRH1, CDRH2, CDRH3, CDRL1, CDRL2, CDRL3, VL, or VH domain. In some instances, the variant library comprises sequences encoding for variation of multiple codons of framework element 1 (FW1), framework element 2 (FW2), framework element 3 (FW3), or framework element 4 (FW4). An exemplary number of codons for variation include, but are not limited to, at least or about 1, 5, 10, 15, 20, 25, 30, 35, 40, 45, 50, 55, 60, 65, 70, 75, 80, 85, 90, 95, 100, 125, 150, 175, 225, 250, 275, 300, or more than 300 codons.

[0048] In some instances, the at least one region of the antibody for variation is from heavy chain V-gene family, heavy chain D-gene family, heavy chain J-gene family, light chain V-gene family, or light chain J-gene family. In some instances, the light chain V-gene family comprises immunoglobulin kappa (IGK) gene or immunoglobulin lambda (IGL). Exemplary regions of the antibody for variation include, but are not limited to, IGHV1-18, IGHV1-69, IGHV1-8, IGHV3-21, IGHV3-23, IGHV3-30/33rn, IGHV3-28, IGHV1-69, IGHV3-74, IGHV4-39, IGHV4-59/61, IGKV1-39, IGKV1-9, IGKV2-28, IGKV3-11, IGKV3-15, IGKV3-20, IGKV4-1, IGLV1-51, IGLV2-14, IGLV1-40, and IGLV3-1. In some instances, the gene is IGHV1-69, IGHV3-30, IGHV3-23, IGHV3, IGHV1-46, IGHV3-7, IGHV1, or IGHV1-8. In some instances, the gene is IGHV1-69 and IGHV3-30. In some instances, the region of the antibody for variation is IGHJ3, IGHJ6, IGHJ, IGHJ4, IGHJ5, IGHJ2, or IGH1. In some instances, the region of the antibody for variation is IGHJ3, IGHJ6, IGHJ, or IGHJ4. In some instances, the at least one region of the antibody for variation is IGHV1-69, IGHV3-23, IGKV3-20, IGKV1-39 or combinations thereof. In some instances, the at least one region of the antibody for variation is IGHV1-69 or IGHV3-23. In some instances, the at least one region of the antibody for variation is IGKV3-20 or IGKV1-39. In some instances, the at least one region of the antibody for variation is IGHV1-69 and IGKV3-20, In some instances, the at least one region of the antibody for variation is IGHV1-69 and IGKV1-39. In some instances, the at least one region of the antibody for variation is IGHV3-23 and IGKV3-20. In some instances, the at least one region of the antibody for variation is IGHV3-23 and IGKV1-39.

[0049] Provided herein are libraries comprising nucleic acids encoding for antibodies, wherein the libraries are synthesized with various numbers of fragments. In some instances, the fragments comprise the CDRH1, CDRH2, CDRH3, CDRL1, CDRL2, CDRL3, VL, or VH domain. In some instances, the fragments comprise framework element 1 (FW1), framework element 2 (FW2), framework element 3 (FW3), or framework element 4 (FW4). In some instances, the antibody libraries are synthesized with at least or about 2 fragments, 3 fragments, 4 fragments, 5 fragments, or more than 5 fragments. The length of each of the nucleic acid fragments or average length of the nucleic acids synthesized may be at least or about 50, 75, 100, 125, 150, 175, 200, 225, 250, 275, 300, 325, 350, 375, 400, 425, 450, 475, 500, 525, 550, 575, 600, or more than 600 base pairs. In some instances, the length is about 50 to 600, 75 to 575, 100 to 550, 125 to 525, 150 to 500, 175 to 475, 200 to 450, 225 to 425, 250 to 400, 275 to 375, or 300 to 350 base pairs.

[0050] Libraries comprising nucleic acids encoding for antibodies or immunoglobulins as described herein comprise various lengths of amino acids when translated. In some instances, the length of each of the amino acid fragments or average length of the amino acid synthesized may be at least or about 15, 20, 25, 30, 35, 40, 45, 50, 55, 60, 65, 70, 75, 80, 85, 90, 95, 100, 105, 110, 115, 120, 125, 130, 135, 140, 145, 150, or more than 150 amino acids. In some instances, the length of the amino acid is about 15 to 150, 20 to 145, 25 to 140, 30 to 135, 35 to 130, 40 to 125, 45 to 120, 50 to 115, 55 to 110, 60 to 110, 65 to 105, 70 to 100, or 75 to 95 amino acids. In some instances, the length of the amino acid is about 22 amino acids to about 75 amino acids. In some instances, the antibodies comprise at least or about 100, 200, 300, 400, 500, 600, 700, 800, 900, 1000, 2000, 3000, 4000, 5000, or more than 5000 amino acids.

[0051] A number of variant sequences for the at least one region of the antibody for variation are de novo synthesized using methods as described herein. In some instances, a number of variant sequences is de novo synthesized for CDRH1, CDRH2, CDRH3, CDRL1, CDRL2, CDRL3, VL, VH, or combinations thereof. In some instances, a number of variant sequences is de novo synthesized for framework element 1 (FW1), framework element 2 (FW2), framework element 3 (FW3), or framework element 4 (FW4). The number of variant sequences may be at least or about 5, 10, 15, 20, 25, 30, 35, 40, 45, 50, 55, 60, 65, 70, 75, 80, 85, 90, 95, 100, 125, 150, 175, 200, 225, 250, 275, 300, 325, 350, 375, 400, 425, 450, 475, 500, or more than 500 sequences. In some instances, the number of variant sequences is at least or about 500, 600, 700, 800, 900, 1000, 2000, 3000, 4000, 5000, 6000, 7000, 8000, or more than 8000 sequences. In some instances, the number of variant sequences is about 10 to 500, 25 to 475, 50 to 450, 75 to 425, 100 to 400, 125 to 375, 150 to 350, 175 to 325, 200 to 300, 225 to 375, 250 to 350, or 275 to 325 sequences.

[0052] Variant sequences for the at least one region of the antibody, in some instances, vary in length or sequence. In some instances, the at least one region that is de novo synthesized is for CDRH1, CDRH2, CDRH3, CDRL1, CDRL2, CDRL3, VL, VH, or combinations thereof. In some instances, the at least one region that is de novo synthesized is for framework element 1 (FW1), framework element 2 (FW2), framework element 3 (FW3), or framework element 4 (FW4). In some instances, the variant sequence comprises at least or about 1, 2, 3, 4, 5, 6, 7, 8, 9, 10, 15, 20, 25, 30, 35, 40, 45, 50, or more than 50 variant nucleotides or amino acids as compared to wild-type. In some instances, the variant sequence comprises at least or about 1, 2, 3, 4, 5, 6, 7, 8, 9, 10, 15, 20, 25, 30, 35, 40, 45, or 50 additional nucleotides or amino acids as compared to wild-type. In some instances, the variant sequence comprises at least or about 1, 2, 3, 4, 5, 6, 7, 8, 9, 10, 15, 20, 25, 30, 35, 40, 45, or 50 less nucleotides or amino acids as compared to wild-type. In some instances, the libraries comprise at least or about 10¹, 10², 10³, 10⁴, 10⁵, 10⁶, 10⁷, 10⁸, 10⁹, 10¹⁰, or more than 10¹⁰ variants.

[0053] Following synthesis of antibody libraries, antibody libraries may be used for screening and analysis. For example, antibody libraries are assayed for library displayability and panning. In some instances, displayability is assayed using a selectable tag. Exemplary tags include, but are not limited to, a radioactive label, a fluorescent label, an enzyme, a chemiluminescent tag, a colorimetric tag, an affinity tag or other labels or tags that are known in the art. In some instances, the tag is histidine, polyhistidine, myc, hemagglutinin (HA), or FLAG. For example, as seen in FIG. 2B. In some instances, antibody libraries are assayed by sequencing using various methods including, but not limited to, single-molecule real-time (SMRT) sequencing, Polony sequencing, sequencing by ligation, reversible terminator sequencing, proton detection sequencing, ion semiconductor sequencing, nanopore sequencing, electronic sequencing, pyrosequencing, Maxam-Gilbert sequencing, chain termination (e.g., Sanger) sequencing, +S sequencing, or sequencing by synthesis. In some instances, antibody libraries are displayed on the surface of a cell or phage. In some instances, antibody libraries are enriched for sequences with a desired activity using phage display.

[0054] In some instances, the antibody libraries are assayed for functional activity, structural stability (e.g., thermal stable or pH stable), expression, specificity, or a combination thereof. In some instances, the antibody libraries are assayed for antibody capable of folding. In some instances, a region of the antibody is assayed for functional activity, structural stability, expression, specificity, folding, or a combination thereof. For example, a VH region or VL region is assayed for functional activity, structural stability, expression, specificity, folding, or a combination thereof.

[0055] Antibodies or IgGs generated by methods as described herein comprise improved binding affinity. In some instances, the antibody comprises a binding affinity (e.g., K_{D}) of less than 1 nM, less than 1.2 nM, less than 2 nM, less than 5 nM, less than 10 nM, less than 11 nm, less than 13.5 nM, less than 15 nM, less than 20 nM, less than 25 nM, or less than 30 nM. In some instances, the antibody comprises a K_{D} of less than 400 nM, less than 350 nM, less than 300 nM, less than 250 nM, less than 200 nM, less than 150 nm, less than 100 nM, less than 50 nM, less than 25 nM, less than 15 nM, or less than 10 nM. In some instances, the antibody comprises a K_{D} of less than 1 nM. In some instances, the antibody comprises a K_{D} of less than 1.2 nM. In some instances, the antibody comprises a K_{D} of less than 2 nM. In some instances, the antibody comprises a K_{D} of less than 5 nM. In some instances, the antibody comprises a K_{D} of less than 10 nM. In some instances, the antibody comprises a K_{D} of less than 13.5 nM. In some instances, the antibody comprises a K_{D} of less than 15 nM. In some instances, the antibody comprises a K_{D} of less than 20 nM. In some instances, the antibody comprises a K_{D} of less than 25 nM. In some instances, the antibody comprises a K_{D} of less than 30 nM.

[0056] In some instances, the affinity of antibodies or IgGs generated by methods as described herein is at least or about 1.5×, 2.0×, 5×, 10×, 20×, 30×, 40×, 50×, 60×, 70×, 80×, 90×, 100×, 200×, or more than 200× improved binding affinity as compared to a comparator antibody. In some instances, the affinity of antibodies or IgGs generated by methods as described herein is at least or about 1.5×, 2.0×, 5×, 10×, 20×, 30×, 40×, 50×, 60×, 70×, 80×, 90×, 100×, 200×, or more than 200× improved function as compared to a comparator antibody. In some instances, the comparator antibody is an antibody with similar structure, sequence, or antigen target.

[0057] Methods as described herein, in some instances, result in increased yield of antibodies or IgGs. In some instances, the yield is at least or about 5, 10, 15, 20, 25, 30, 35, 40, 45, 50, 55, 60, 65, 70, 75, 80, or more than 80 micrograms (ug). In some instances, the yield is in a range of about 5 to about 80, about 10 to about 75, about 15 to about 60, about 20 to about 50, or about 30 to about 40 micrograms (ug).

### Expression Systems

[0058] Provided herein are libraries comprising nucleic acids encoding for antibody comprising binding domains, wherein the libraries have improved specificity, stability, expression, folding, or downstream activity. In some instances, libraries described herein are used for screening and analysis.

[0059] Provided herein are libraries comprising nucleic acids encoding for antibody comprising binding domains, wherein the nucleic acid libraries are used for screening and analysis. In some instances, screening and analysis comprises in vitro, in vivo, or ex vivo assays. Cells for screening include primary cells taken from living subjects or cell lines. Cells may be from prokaryotes (e.g., bacteria and fungi) or eukaryotes (e.g., animals and plants). Exemplary animal cells include, without limitation, those from a mouse, rabbit, primate, and insect. In some instances, cells for screening include a cell line including, but not limited to, Chinese Hamster Ovary (CHO) cell line, human embryonic kidney (HEK) cell line, or baby hamster kidney (BHK) cell line. In some instances, nucleic acid libraries described herein may also be delivered to a multicellular organism. Exemplary multicellular organisms include, without limitation, a plant, a mouse, rabbit, primate, and insect.

[0060] Nucleic acid libraries described herein may be screened for various pharmacological or pharmacokinetic properties. In some instances, the libraries are screened using in vitro assays, in vivo assays, or ex vivo assays. For example, in vitro pharmacological or pharmacokinetic properties that are screened include, but are not limited to, binding affinity, binding specificity, and binding avidity. Exemplary in vivo pharmacological or pharmacokinetic properties of libraries described herein that are screened include, but are not limited to, therapeutic efficacy, activity, preclinical toxicity properties, clinical efficacy properties, clinical toxicity properties, immunogenicity, potency, and clinical safety properties.

[0061] Provided herein are nucleic acid libraries, wherein the nucleic acid libraries may be expressed in a vector. Expression vectors for inserting nucleic acid libraries disclosed herein may comprise eukaryotic or prokaryotic expression vectors. Exemplary expression vectors include, without limitation, mammalian expression vectors: pSF-CMV-NEO-NH2-PPT-3×FLAG, pSF-CMV-NEO-COOH-3×FLAG, pSF-CMV-PURO-NH2-GST-TEV, pSF-OXB20-COOH-TEV-FLAG(R)-6His, pCEP4 pDEST27, pSF-CMV-Ub-KrYFP, pSF-CMV-FMDV-daGFP, pEF1a-mCherry-N1 Vector, pEF1a-tdTomato Vector, pSF-CMV-FMDV-Hygro, pSF-CMV-PGK-Puro, pMCP-tag(m), and pSF-CMV-PURO-NH2-CMYC; bacterial expression vectors: pSF-OXB20-BetaGal,pSF-OXB20-Fluc, pSF-OXB20, and pSF-Tac; plant expression vectors: pRI 101-AN DNA and pCambia2301; and yeast expression vectors: pTYB21 and pKLAC2, and insect vectors: pAc5.1/V5-His A and pDEST8. In some instances, the vector is pcDNA3 or pcDNA3.1.

[0062] Described herein are nucleic acid libraries that are expressed in a vector to generate a construct comprising an antibody. In some instances, a size of the construct varies. In some instances, the construct comprises at least or about 500, 600, 700, 800, 900, 1000, 1100, 1300, 1400, 1500, 1600, 1700, 1800, 2000, 2400, 2600, 2800, 3000, 3200, 3400, 3600, 3800, 4000, 4200, 4400, 4600, 4800, 5000, 6000, 7000, 8000, 9000, 10000, or more than 10000 bases. In some instances, a the construct comprises a range of about 300 to 1,000, 300 to 2,000, 300 to 3,000, 300 to 4,000, 300 to 5,000, 300 to 6,000, 300 to 7,000, 300 to 8,000, 300 to 9,000, 300 to 10,000, 1,000 to 2,000, 1,000 to 3,000, 1,000 to 4,000, 1,000 to 5,000, 1,000 to 6,000, 1,000 to 7,000, 1,000 to 8,000, 1,000 to 9,000, 1,000 to 10,000, 2,000 to 3,000, 2,000 to 4,000, 2,000 to 5,000, 2,000 to 6,000, 2,000 to 7,000, 2,000 to 8,000, 2,000 to 9,000, 2,000 to 10,000, 3,000 to 4,000, 3,000 to 5,000, 3,000 to 6,000, 3,000 to 7,000, 3,000 to 8,000, 3,000 to 9,000, 3,000 to 10,000, 4,000 to 5,000, 4,000 to 6,000, 4,000 to 7,000, 4,000 to 8,000, 4,000 to 9,000, 4,000 to 10,000, 5,000 to 6,000, 5,000 to 7,000, 5,000 to 8,000, 5,000 to 9,000, 5,000 to 10,000, 6,000 to 7,000, 6,000 to 8,000, 6,000 to 9,000, 6,000 to 10,000, 7,000 to 8,000, 7,000 to 9,000, 7,000 to 10,000, 8,000 to 9,000, 8,000 to 10,000, or 9,000 to 10,000 bases.

[0063] Provided herein are libraries comprising nucleic acids encoding for antibodies, wherein the nucleic acid libraries are expressed in a cell. In some instances, the libraries are synthesized to express a reporter gene. Exemplary reporter genes include, but are not limited to, acetohydroxyacid synthase (AHAS), alkaline phosphatase (AP), beta galactosidase (LacZ), beta glucoronidase (GUS), chloramphenicol acetyltransferase (CAT), green fluorescent protein (GFP), red fluorescent protein (RFP), yellow fluorescent protein (YFP), cyan fluorescent protein (CFP), cerulean fluorescent protein, citrine fluorescent protein, orange fluorescent protein, cherry fluorescent protein, turquoise fluorescent protein, blue fluorescent protein, horseradish peroxidase (HRP), luciferase (Luc), nopaline synthase (NOS), octopine synthase (OCS), luciferase, and derivatives thereof. Methods to determine modulation of a reporter gene are well known in the art, and include, but are not limited to, fluorometric methods (e.g. fluorescence spectroscopy, Fluorescence Activated Cell Sorting (FACS), fluorescence microscopy), and antibiotic resistance determination.

### Diseases and Disorders

[0064] Provided herein are libraries comprising nucleic acids encoding for antibodies or immunoglobulins including VHH antibodies that may have therapeutic effects. In some instances, the antibodies or immunoglobulin result in protein when translated that is used to treat a disease or disorder in a subject. Exemplary diseases include, but are not limited to, cancer, inflammatory diseases or disorders, a metabolic disease or disorder, a cardiovascular disease or disorder, a respiratory disease or disorder, pain, a digestive disease or disorder, a reproductive disease or disorder, an endocrine disease or disorder, or a neurological disease or disorder. In some instances, the cancer is a solid cancer or a hematologic cancer. In some instances, the subject is a mammal. In some instances, the subject is a mouse, rabbit, dog, or human. Subjects treated by methods described herein may be infants, adults, or children. Pharmaceutical compositions comprising antibodies or antibody fragments as described herein may be administered intravenously or subcutaneously.

[0065] In some instances, the disease or disorder is associated with TIGIT dysfunction. In some instances, the disease or disorder is associated with aberrant signaling via TIGIT.

[0066] Provided herein are libraries comprising nucleic acids encoding for antibodies or immunoglobulins that may be designed for various protein targets. In some instances, the protein is an ion channel, G protein-coupled receptor, tyrosine kinase receptor, an immune receptor, a membrane protein, or combinations thereof. In some instances, the protein is a receptor. In some instances, the protein is T cell immunoreceptor with Ig and ITIM domains (TIGIT).

[0067] Described herein, in some embodiments, are antibodies or immunoglobulins that bind to the TIGIT. In some instances, the TIGIT antibody or immunoglobulin sequence comprises a sequence comprising at least or about 70%, 80%, 85%, 90%, 91%, 92%, 93%, 94%, 95%, 96%, 97%, 98%, 99%, or 100% sequence identity to any one of SEQ ID NOs: 2239-3096. In some instances, the TIGIT antibody or immunoglobulin sequence comprises a sequence comprising at least or about 95% sequence identity to any one of SEQ ID NOs: 2239-3096. In some instances, the TIGIT antibody or immunoglobulin sequence comprises a sequence comprising at least or about 97% sequence identity to any one of SEQ ID NOs: 2239-3096. In some instances, the TIGIT antibody or immunoglobulin sequence comprises a sequence comprising at least or about 99% sequence identity to any one of SEQ ID NOs: 2239-3096. In some instances, the TIGIT antibody or immunoglobulin sequence comprises a sequence comprising at least or about 100% sequence identity to any one of SEQ ID NOs: 2239-3096. In some instances, the TIGIT antibody or immunoglobulin sequence comprises a sequence comprising at least a portion having at least or about 1, 2, 3, 4, 5, 6, 7, 8, 9, 10, 12, 14, 16, 18, 20, or more than 20 amino acids of any one of SEQ ID NOs: 2239-3096. In some instances, the TIGIT antibody or immunoglobulin sequence comprises a sequence comprising at least a portion having at least or about 1, 2, 3, 4, 5, 6, 7, 8, 9, 10, 12, 14, 16, 18, 20, 30, 40, 50, 60, 70, 80, 90, 100, 110, 120, 130, 140, 150, or more than 150 amino acids of any one of SEQ ID NOs: 2239-3096.

[0068] In some instances, the TIGIT antibody or immunoglobulin sequence comprises a variable domain of heavy chain comprising at least or about 70%, 80%, 85%, 90%, 91%, 92%, 93%, 94%, 95%, 96%, 97%, 98%, 99%, or 100% sequence identity to any one of SEQ ID NOs: 2555-2636 or 2883-3096. In some instances, the TIGIT antibody or immunoglobulin sequence comprises a variable domain of heavy chain comprising at least or about 95% sequence identity to any one of SEQ ID NOs: 2555-2636 or 2883-3096. In some instances, the TIGIT antibody or immunoglobulin sequence comprises a variable domain of heavy chain comprising at least or about 97% sequence identity to any one of SEQ ID NOs: 2555-2636 or 2883-3096. In some instances, the TIGIT antibody or immunoglobulin sequence comprises a variable domain of heavy chain comprising at least or about 99% sequence identity to any one of SEQ ID NOs: 2555-2636 or 2883-3096. In some instances, the TIGIT antibody or immunoglobulin sequence comprises a variable domain of heavy chain comprising at least or about 100% sequence identity to any one of SEQ ID NOs: 2555-2636 or 2883-3096. In some instances, the TIGIT antibody or immunoglobulin sequence comprises a variable domain of heavy chain comprising at least a portion having at least or about 1, 2, 3, 4, 5, 6, 7, 8, 9, 10, 12, 14, 16, 18, 20, 30, 40, 50, 60, 70, 80, 90, 100, 110, 120, 130, 140, 150, or more than 150 amino acids of any one of SEQ ID NOs: 2555-2636 or 2883-3096.

[0069] In some embodiments, the TIGIT antibody or immunoglobulin sequence comprises complementarity determining regions (CDRs) comprising at least or about 70%, 80%, 85%, 90%, 91%, 92%, 93%, 94%, 95%, 96%, 97%, 98%, 99%, or 100% sequence identity to any one of SEQ ID NOs: 2239-2531 or 2637-2882. In some instances, the antibody or immunoglobulin sequence comprises complementarity determining regions (CDRs) comprising at least or about 95% homology to any one of SEQ ID NOs: 2239-2531 or 2637-2882. In some instances, the antibody or immunoglobulin sequence comprises complementarity determining regions (CDRs) comprising at least or about 97% homology to any one of SEQ ID NOs: 2239-2531 or 2637-2882. In some instances, the antibody or immunoglobulin sequence comprises complementarity determining regions (CDRs) comprising at least or about 99% homology to any one of SEQ ID NOs: 2239-2531 or 2637-2882. In some instances, the antibody or immunoglobulin sequence comprises complementarity determining regions (CDRs) comprising at least or about 100% homology to any one of SEQ ID NOs: 2239-2531 or 2637-2882. In some instances, the antibody or immunoglobulin sequence comprises complementarity determining regions (CDRs) comprising at least a portion having at least or about 3, 4, 5, 6, 7, 8, 9, 10, 12, 14, 16, or more than 16 amino acids of any one of SEQ ID NOs: 2239-2531 or 2637-2882.

[0070] In some embodiments, the TIGIT antibody or immunoglobulin sequence comprises a CDR1 comprising at least or about 70%, 80%, 85%, 90%, 91%, 92%, 93%, 94%, 95%, 96%, 97%, 98%, 99%, or 100% sequence identity to any one of SEQ ID NOs: 2239-2287, 2386-2433, or 2637-2718. In some instances, the antibody or immunoglobulin sequence comprises CDR1 comprising at least or about 95% homology of any one of SEQ ID NOs: 2239-2287, 2386-2433, or 2637-2718. In some instances, the antibody or immunoglobulin sequence comprises CDR1 comprising at least or about 97% homology to any one of SEQ ID NOs: 2239-2287, 2386-2433, or 2637-2718. In some instances, the antibody or immunoglobulin sequence comprises CDR1 comprising at least or about 99% homology to any one of SEQ ID NOs: 2239-2287, 2386-2433, or 2637-2718. In some instances, the antibody or immunoglobulin sequence comprises CDR1 comprising at least or about 100% homology to any one of SEQ ID NOs: 2239-2287, 2386-2433, or 2637-2718. In some instances, the antibody or immunoglobulin sequence comprises CDR1 comprising at least a portion having at least or about 3, 4, 5, 6, 7, 8, 9, 10, 12, 14, 16, or more than 16 amino acids of any one of SEQ ID NOs: 2239-2287, 2386-2433, or 2637-2718.

[0071] In some embodiments, the TIGIT antibody or immunoglobulin sequence comprises a CDR2 comprising at least or about 70%, 80%, 85%, 90%, 91%, 92%, 93%, 94%, 95%, 96%, 97%, 98%, 99%, or 100% sequence identity to any one of SEQ ID NOs: 2288-2336, 2434-2482, or 2719-2800. In some instances, the antibody or immunoglobulin sequence comprises CDR2 comprising at least or about 95% homology to any one of SEQ ID NOs: 2288-2336, 2434-2482, or 2719-2800. In some instances, the antibody or immunoglobulin sequence comprises CDR2 comprising at least or about 97% homology to any one of SEQ ID NOs: 2288-2336, 2434-2482, or 2719-2800. In some instances, the antibody or immunoglobulin sequence comprises CDR2 comprising at least or about 99% homology to any one of SEQ ID NOs: 2288-2336, 2434-2482, or 2719-2800. In some instances, the antibody or immunoglobulin sequence comprises CDR2 comprising at least or about 100% homology to any one of SEQ ID NOs: 2288-2336, 2434-2482, or 2719-2800. In some instances, the antibody or immunoglobulin sequence comprises CDR2 comprising at least a portion having at least or about 3, 4, 5, 6, 7, 8, 9, 10, 12, 14, 16, or more than 16 amino acids of any one of SEQ ID NOs: 2288-2336, 2434-2482, or 2719-2800.

[0072] In some embodiments, the TIGIT antibody or immunoglobulin sequence comprises a CDR3 comprising at least or about 70%, 80%, 85%, 90%, 91%, 92%, 93%, 94%, 95%, 96%, 97%, 98%, 99%, or 100% sequence identity to any one of SEQ ID NOs: 2337-2385, 2483-2531, or 2801-2882. In some instances, the antibody or immunoglobulin sequence comprises CDR3 comprising at least or about 95% homology to any one of SEQ ID NOs: 2337-2385, 2483-2531, or 2801-2882. In some instances, the antibody or immunoglobulin sequence comprises CDR3 comprising at least or about 97% homology to any one of SEQ ID NOs: 2337-2385, 2483-2531, or 2801-2882. In some instances, the antibody or immunoglobulin sequence comprises CDR3 comprising at least or about 99% homology to any one of SEQ ID NOs: 2337-2385, 2483-2531, or 2801-2882. In some instances, the antibody or immunoglobulin sequence comprises CDR3 comprising at least or about 100% homology to any one of SEQ ID NOs: 2337-2385, 2483-2531, or 2801-2882. In some instances, the antibody or immunoglobulin sequence comprises CDR3 comprising at least a portion having at least or about 3, 4, 5, 6, 7, 8, 9, 10, 12, 14, 16, or more than 16 amino acids of any one of SEQ ID NOs: 2337-2385, 2483-2531, or 2801-2882.

[0073] In some embodiments, the TIGIT antibody or immunoglobulin sequence comprises a CDRH1 comprising at least or about 70%, 80%, 85%, 90%, 91%, 92%, 93%, 94%, 95%, 96%, 97%, 98%, 99%, or 100% sequence identity to any one of SEQ ID NOs: 2239-2287. In some instances, the antibody or immunoglobulin sequence comprises CDRH1 comprising at least or about 95% homology of any one of SEQ ID NOs: 2239-2287. In some instances, the antibody or immunoglobulin sequence comprises CDRH1 comprising at least or about 97% homology to any one of SEQ ID NOs: 2239-2287. In some instances, the antibody or immunoglobulin sequence comprises CDRH1 comprising at least or about 99% homology to any one of SEQ ID NOs: 2239-2287. In some instances, the antibody or immunoglobulin sequence comprises CDRH1 comprising at least or about 100% homology to any one of SEQ ID NOs: 2239-2287. In some instances, the antibody or immunoglobulin sequence comprises CDRH1 comprising at least a portion having at least or about 3, 4, 5, 6, 7, 8, 9, 10, 12, 14, 16, or more than 16 amino acids of any one of SEQ ID NOs: 2239-2287.

[0074] In some embodiments, the TIGIT antibody or immunoglobulin sequence comprises a CDRH2 comprising at least or about 70%, 80%, 85%, 90%, 91%, 92%, 93%, 94%, 95%, 96%, 97%, 98%, 99%, or 100% sequence identity to any one of SEQ ID NOs: 2288-2336. In some instances, the antibody or immunoglobulin sequence comprises CDRH2 comprising at least or about 95% homology to any one of SEQ ID NOs: 2288-2336. In some instances, the antibody or immunoglobulin sequence comprises CDRH2 comprising at least or about 97% homology to any one of SEQ ID NOs: 2288-2336. In some instances, the antibody or immunoglobulin sequence comprises CDRH2 comprising at least or about 99% homology to any one of SEQ ID NOs: 2288-2336. In some instances, the antibody or immunoglobulin sequence comprises CDRH2 comprising at least or about 100% homology to any one of SEQ ID NOs: 2288-2336. In some instances, the antibody or immunoglobulin sequence comprises CDRH2 comprising at least a portion having at least or about 3, 4, 5, 6, 7, 8, 9, 10, 12, 14, 16, or more than 16 amino acids of any one of SEQ ID NOs: 2288-2336.

[0075] In some embodiments, the TIGIT antibody or immunoglobulin sequence comprises a CDRH3 comprising at least or about 70%, 80%, 85%, 90%, 91%, 92%, 93%, 94%, 95%, 96%, 97%, 98%, 99%, or 100% sequence identity to any one of SEQ ID NOs: 2337-2385. In some instances, the antibody or immunoglobulin sequence comprises CDRH3 comprising at least or about 95% homology to any one of SEQ ID NOs: 2337-2385. In some instances, the antibody or immunoglobulin sequence comprises CDRH3 comprising at least or about 97% homology to any one of SEQ ID NOs: 2337-2385. In some instances, the antibody or immunoglobulin sequence comprises CDRH3 comprising at least or about 99% homology to any one of SEQ ID NOs: 2337-2385. In some instances, the antibody or immunoglobulin sequence comprises CDRH3 comprising at least or about 100% homology to any one of SEQ ID NOs: 2337-2385. In some instances, the antibody or immunoglobulin sequence comprises CDRH3 comprising at least a portion having at least or about 3, 4, 5, 6, 7, 8, 9, 10, 12, 14, 16, or more than 16 amino acids of any one of SEQ ID NOs: 2337-2385.

[0076] In some embodiments, the TIGIT antibody or immunoglobulin sequence comprises a CDRL1 comprising at least or about 70%, 80%, 85%, 90%, 91%, 92%, 93%, 94%, 95%, 96%, 97%, 98%, 99%, or 100% sequence identity to any one of SEQ ID NOs: 2386-2433. In some instances, the antibody or immunoglobulin sequence comprises CDRL1 comprising at least or about 95% homology of any one of SEQ ID NOs: 2386-2433. In some instances, the antibody or immunoglobulin sequence comprises CDRL1 comprising at least or about 97% homology to any one of SEQ ID NOs: 2386-2433. In some instances, the antibody or immunoglobulin sequence comprises CDRL1 comprising at least or about 99% homology to any one of SEQ ID NOs: 2386-2433. In some instances, the antibody or immunoglobulin sequence comprises CDRL1 comprising at least or about 100% homology to any one of SEQ ID NOs: 2386-2433. In some instances, the antibody or immunoglobulin sequence comprises CDRL1 comprising at least a portion having at least or about 3, 4, 5, 6, 7, 8, 9, 10, 12, 14, 16, or more than 16 amino acids of any one of SEQ ID NOs: 2386-2433.

[0077] In some embodiments, the TIGIT antibody or immunoglobulin sequence comprises a CDRL2 comprising at least or about 70%, 80%, 85%, 90%, 91%, 92%, 93%, 94%, 95%, 96%, 97%, 98%, 99%, or 100% sequence identity to any one of SEQ ID NOs: 2434-2482. In some instances, the antibody or immunoglobulin sequence comprises CDRL2 comprising at least or about 95% homology to any one of SEQ ID NOs: 2434-2482. In some instances, the antibody or immunoglobulin sequence comprises CDRL2 comprising at least or about 97% homology to any one of SEQ ID NOs: 2434-2482. In some instances, the antibody or immunoglobulin sequence comprises CDRL2 comprising at least or about 99% homology to any one of SEQ ID NOs: 2434-2482. In some instances, the antibody or immunoglobulin sequence comprises CDRL2 comprising at least or about 100% homology to any one of SEQ ID NOs: 2434-2482. In some instances, the antibody or immunoglobulin sequence comprises CDRL2 comprising at least a portion having at least or about 3, 4, 5, 6, 7, 8, 9, 10, 12, 14, 16, or more than 16 amino acids of any one of SEQ ID NOs: 2434-2482.

[0078] In some embodiments, the TIGIT antibody or immunoglobulin sequence comprises a CDRL3 comprising at least or about 70%, 80%, 85%, 90%, 91%, 92%, 93%, 94%, 95%, 96%, 97%, 98%, 99%, or 100% sequence identity to any one of SEQ ID NOs: 2483-2531. In some instances, the antibody or immunoglobulin sequence comprises CDRL3 comprising at least or about 95% homology to any one of SEQ ID NOs: 2483-2531. In some instances, the antibody or immunoglobulin sequence comprises CDRL3 comprising at least or about 97% homology to any one of SEQ ID NOs: 2483-2531. In some instances, the antibody or immunoglobulin sequence comprises CDRL3 comprising at least or about 99% homology to any one of SEQ ID NOs: 2483-2531. In some instances, the antibody or immunoglobulin sequence comprises CDRL3 comprising at least or about 100% homology to any one of SEQ ID NOs: 2483-2531. In some instances, the antibody or immunoglobulin sequence comprises CDRL3 comprising at least a portion having at least or about 3, 4, 5, 6, 7, 8, 9, 10, 12, 14, 16, or more than 16 amino acids of any one of SEQ ID NOs: 2483-2531.

[0079] In some embodiments, the TIGIT antibody or immunoglobulin sequence comprises a CDRH1 comprising at least or about 70%, 80%, 85%, 90%, 91%, 92%, 93%, 94%, 95%, 96%, 97%, 98%, 99%, or 100% sequence identity to any one of SEQ ID NOs: 2239-2287 and a CDRL1 comprising at least or about 70%, 80%, 85%, 90%, 91%, 92%, 93%, 94%, 95%, 96%, 97%, 98%, 99%, or 100% sequence identity to any one of SEQ ID NOs: 2386-2433. In some instances, the antibody or immunoglobulin sequence comprises CDRH1 comprising at least or about 95% homology of any one of SEQ ID NOs: 2239-2287 and a CDRL1 comprising at least or about 95% homology of any one of SEQ ID NOs: 2386-2433. In some instances, the antibody or immunoglobulin sequence comprises CDRH1 comprising at least or about 97% homology to any one of SEQ ID NOs: 2239-2287 and a CDRL1 comprising at least or about 97% homology to any one of SEQ ID NOs: 2386-2433. In some instances, the antibody or immunoglobulin sequence comprises CDRH1 comprising at least or about 99% homology to any one of SEQ ID NOs: 1895 and a CDRL1 comprising at least or about 99% homology to any one of SEQ ID NOs: 2386-2433. In some instances, the antibody or immunoglobulin sequence comprises CDRH1 comprising at least or about 100% homology to any one of SEQ ID NOs: 2239-2287 and a CDRL1 comprising at least or about 100% homology to any one of SEQ ID NOs: 2386-2433. In some instances, the antibody or immunoglobulin sequence comprises CDRH1 comprising at least a portion having at least or about 3, 4, 5, 6, 7, 8, 9, 10, 12, 14, 16, or more than 16 amino acids of any one of SEQ ID NOs: 2239-2287 and a CDRL1 comprising at least a portion having at least or about 3, 4, 5, 6, 7, 8, 9, 10, 12, 14, 16, or more than 16 amino acids of any one of SEQ ID NOs: 2386-2433.

[0080] In some embodiments, the TIGIT antibody or immunoglobulin sequence comprises a CDRH2 comprising at least or about 70%, 80%, 85%, 90%, 91%, 92%, 93%, 94%, 95%, 96%, 97%, 98%, 99%, or 100% sequence identity to any one of SEQ ID NOs: 2288-2336 and a CDRL2 comprising at least or about 70%, 80%, 85%, 90%, 91%, 92%, 93%, 94%, 95%, 96%, 97%, 98%, 99%, or 100% sequence identity to any one of SEQ ID NOs: 2434-2482. In some instances, the antibody or immunoglobulin sequence comprises CDRH2 comprising at least or about 95% homology to any one of SEQ ID NOs: 2288-2336 and a CDRL2 comprising at least or about 95% homology to any one of SEQ ID NOs: 2434-2482. In some instances, the antibody or immunoglobulin sequence comprises CDRH2 comprising at least or about 97% homology to any one of SEQ ID NOs: 2288-2336 and a CDRL2 comprising at least or about 97% homology to any one of SEQ ID NOs: 2434-2482. In some instances, the antibody or immunoglobulin sequence comprises CDRH2 comprising at least or about 99% homology to any one of SEQ ID NOs: 2288-2336 and a CDRL2 comprising at least or about 99% homology to any one of SEQ ID NOs: 2434-2482. In some instances, the antibody or immunoglobulin sequence comprises CDRH2 comprising at least or about 100% homology to any one of SEQ ID NOs: 2288-2336 and a CDRL2 comprising at least or about 100% homology to any one of SEQ ID NOs: 2434-2482. In some instances, the antibody or immunoglobulin sequence comprises CDRH2 comprising at least a portion having at least or about 3, 4, 5, 6, 7, 8, 9, 10, 12, 14, 16, or more than 16 amino acids of any one of SEQ ID NOs: 2288-2336 and a CDRL2 comprising at least a portion having at least or about 3, 4, 5, 6, 7, 8, 9, 10, 12, 14, 16, or more than 16 amino acids of any one of SEQ ID NOs: 2434-2482.

[0081] In some embodiments, the TIGIT antibody or immunoglobulin sequence comprises a CDRH3 comprising at least or about 70%, 80%, 85%, 90%, 91%, 92%, 93%, 94%, 95%, 96%, 97%, 98%, 99%, or 100% sequence identity to any one of SEQ ID NOs: 2337-2385 and a CDRL3 comprising at least or about 70%, 80%, 85%, 90%, 91%, 92%, 93%, 94%, 95%, 96%, 97%, 98%, 99%, or 100% sequence identity to any one of SEQ ID NOs: 2483-2531. In some instances, the antibody or immunoglobulin sequence comprises CDRH3 comprising at least or about 95% homology to any one of SEQ ID NOs: 2337-2385 and a CDRL3 comprising at least or about 95% homology to any one of SEQ ID NOs: 2483-2531. In some instances, the antibody or immunoglobulin sequence comprises CDRH3 comprising at least or about 97% homology to any one of SEQ ID NOs: 2337-2385 and a CDRL3 comprising at least or about 97% homology to any one of SEQ ID NOs: 2483-2531. In some instances, the antibody or immunoglobulin sequence comprises CDRH3 comprising at least or about 99% homology to any one of SEQ ID NOs: 2337-2385 and a CDRL3 comprising at least or about 99% homology to any one of SEQ ID NOs: 2483-2531. In some instances, the antibody or immunoglobulin sequence comprises CDRH3 comprising at least or about 100% homology to any one of SEQ ID NOs: 2337-2385 and a CDRL3 comprising at least or about 100% homology to any one of SEQ ID NOs: 2483-2531. In some instances, the antibody or immunoglobulin sequence comprises CDRH3 comprising at least a portion having at least or about 3, 4, 5, 6, 7, 8, 9, 10, 12, 14, 16, or more than 16 amino acids of any one of SEQ ID NOs: 2337-2385 and a CDRL3 comprising at least a portion having at least or about 3, 4, 5, 6, 7, 8, 9, 10, 12, 14, 16, or more than 16 amino acids of any one of SEQ ID NOs: 2483-2531.

### Variant Libraries

### Codon Variation

[0082] Variant nucleic acid libraries described herein may comprise a plurality of nucleic acids, wherein each nucleic acid encodes for a variant codon sequence compared to a reference nucleic acid sequence. In some instances, each nucleic acid of a first nucleic acid population contains a variant at a single variant site. In some instances, the first nucleic acid population contains a plurality of variants at a single variant site such that the first nucleic acid population contains more than one variant at the same variant site. The first nucleic acid population may comprise nucleic acids collectively encoding multiple codon variants at the same variant site. The first nucleic acid population may comprise nucleic acids collectively encoding up to 19 or more codons at the same position. The first nucleic acid population may comprise nucleic acids collectively encoding up to 60 variant triplets at the same position, or the first nucleic acid population may comprise nucleic acids collectively encoding up to 61 different triplets of codons at the same position. Each variant may encode for a codon that results in a different amino acid during translation. Table 1 provides a listing of each codon possible (and the representative amino acid) for a variant site.

TABLE 1
List of codons and amino acids

| | One | Three | |
|---|---|---|---|
| | letter | letter | |
| Amino Acids | code | code | Codons |
| Alanine | A | Ala | GCA GCC GCG GCT |
| Cysteine | C | Cys | TGC TGT |
| Aspartic acid | D | Asp | GAC GAT |
| Glutamic acid | E | Glu | GAA GAG |
| Phenylalanine | F | Phe | TTC TTT |
| Glycine | G | Gly | GGA GGC GGG GGT |
| Histidine | H | His | CAC CAT |
| Isoleucine | I | Iso | ATA ATC ATT |
| Lysine | K | Lys | AAA AAG |
| Leucine | L | Leu | TTA TTG CTA CTC |
| | | | CTG CTT |
| Methionine | M | Met | ATG |
| Asparagine | N | Asn | AAC AAT |
| Proline | P | Pro | CCA CCC CCG CCT |
| Glutamine | Q | Gln | CAA CAG |
| Arginine | R | Arg | AGA AGG CGA CGC |
| Serine | S | Ser | AGC AGT TCA TCC |
| | | | TCG TCT |
| Threonine | T | Thr | ACA ACC ACG ACT |
| Valine | V | Val | GTA GTC GTG GTT |
| Tryptophan | W | Trp | TGG |
| Tyrosine | Y | Tyr | TAC TAT |

[0083] A nucleic acid population may comprise varied nucleic acids collectively encoding up to 20 codon variations at multiple positions. In such cases, each nucleic acid in the population comprises variation for codons at more than one position in the same nucleic acid. In some instances, each nucleic acid in the population comprises variation for codons at 1, 2, 3, 4, 5, 6, 7, 8, 9, 10, 11, 12, 13, 14, 15, 16, 17, 18, 19, 20 or more codons in a single nucleic acid. In some instances, each variant long nucleic acid comprises variation for codons at 1, 2, 3, 4, 5, 6, 7, 8, 9, 10, 11, 12, 13, 14, 15, 16, 17, 18, 19, 20, 21, 22, 23, 24, 25, 26, 27, 28, 29, 30 or more codons in a single long nucleic acid. In some instances, the variant nucleic acid population comprises variation for codons at 1, 2, 3, 4, 5, 6, 7, 8, 9, 10, 11, 12, 13, 14, 15, 16, 17, 18, 19, 20, 21, 22, 23, 24, 25, 26, 27, 28, 29, 30 or more codons in a single nucleic acid. In some instances, the variant nucleic acid population comprises variation for codons in at least about 10, 20, 30, 40, 50, 60, 70, 80, 90, 100 or more codons in a single long nucleic acid.

### Highly Parallel Nucleic Acid Synthesis

[0084] Provided herein is a platform approach utilizing miniaturization, parallelization, and vertical integration of the end-to-end process from polynucleotide synthesis to gene assembly within nanowells on silicon to create a revolutionary synthesis platform. Devices described herein provide, with the same footprint as a 96-well plate, a silicon synthesis platform is capable of increasing throughput by a factor of up to 1,000 or more compared to traditional synthesis methods, with production of up to approximately 1,000,000 or more polynucleotides, or 10,000 or more genes in a single highly-parallelized run.

[0085] With the advent of next-generation sequencing, high resolution genomic data has become an important factor for studies that delve into the biological roles of various genes in both normal biology and disease pathogenesis. At the core of this research is the central dogma of molecular biology and the concept of “residue-by-residue transfer of sequential information.” Genomic information encoded in the DNA is transcribed into a message that is then translated into the protein that is the active product within a given biological pathway.

[0086] Another exciting area of study is on the discovery, development and manufacturing of therapeutic molecules focused on a highly-specific cellular target. High diversity DNA sequence libraries are at the core of development pipelines for targeted therapeutics. Gene mutants are used to express proteins in a design, build, and test protein engineering cycle that ideally culminates in an optimized gene for high expression of a protein with high affinity for its therapeutic target. As an example, consider the binding pocket of a receptor. The ability to test all sequence permutations of all residues within the binding pocket simultaneously will allow for a thorough exploration, increasing chances of success. Saturation mutagenesis, in which a researcher attempts to generate all possible mutations at a specific site within the receptor, represents one approach to this development challenge. Though costly and time and labor-intensive, it enables each variant to be introduced into each position. In contrast, combinatorial mutagenesis, where a few selected positions or short stretch of DNA may be modified extensively, generates an incomplete repertoire of variants with biased representation.

[0087] To accelerate the drug development pipeline, a library with the desired variants available at the intended frequency in the right position available for testing—in other words, a precision library, enables reduced costs as well as turnaround time for screening. Provided herein are methods for synthesizing nucleic acid synthetic variant libraries which provide for precise introduction of each intended variant at the desired frequency. To the end user, this translates to the ability to not only thoroughly sample sequence space but also be able to query these hypotheses in an efficient manner, reducing cost and screening time. Genome-wide editing can elucidate important pathways, libraries where each variant and sequence permutation can be tested for optimal functionality, and thousands of genes can be used to reconstruct entire pathways and genomes to re-engineer biological systems for drug discovery.

[0088] In a first example, a drug itself can be optimized using methods described herein. For example, to improve a specified function of an antibody, a variant polynucleotide library encoding for a portion of the antibody is designed and synthesized. A variant nucleic acid library for the antibody can then be generated by processes described herein (e.g., PCR mutagenesis followed by insertion into a vector). The antibody is then expressed in a production cell line and screened for enhanced activity. Example screens include examining modulation in binding affinity to an antigen, stability, or effector function (e.g., ADCC, complement, or apoptosis). Exemplary regions to optimize the antibody include, without limitation, the Fc region, Fab region, variable region of the Fab region, constant region of the Fab region, variable domain of the heavy chain or light chain (V_{H} or V_{L}), and specific complementarity-determining regions (CDRs) of V_{H} or V_{L}.

[0089] Nucleic acid libraries synthesized by methods described herein may be expressed in various cells associated with a disease state. Cells associated with a disease state include cell lines, tissue samples, primary cells from a subject, cultured cells expanded from a subject, or cells in a model system. Exemplary model systems include, without limitation, plant and animal models of a disease state.

[0090] To identify a variant molecule associated with prevention, reduction or treatment of a disease state, a variant nucleic acid library described herein is expressed in a cell associated with a disease state, or one in which a cell a disease state can be induced. In some instances, an agent is used to induce a disease state in cells. Exemplary tools for disease state induction include, without limitation, a Cre/Lox recombination system, LPS inflammation induction, and streptozotocin to induce hypoglycemia. The cells associated with a disease state may be cells from a model system or cultured cells, as well as cells from a subject having a particular disease condition. Exemplary disease conditions include a bacterial, fungal, viral, autoimmune, or proliferative disorder (e.g., cancer). In some instances, the variant nucleic acid library is expressed in the model system, cell line, or primary cells derived from a subject, and screened for changes in at least one cellular activity. Exemplary cellular activities include, without limitation, proliferation, cycle progression, cell death, adhesion, migration, reproduction, cell signaling, energy production, oxygen utilization, metabolic activity, and aging, response to free radical damage, or any combination thereof.

### Substrates

[0091] Devices used as a surface for polynucleotide synthesis may be in the form of substrates which include, without limitation, homogenous array surfaces, patterned array surfaces, channels, beads, gels, and the like. Provided herein are substrates comprising a plurality of clusters, wherein each cluster comprises a plurality of loci that support the attachment and synthesis of polynucleotides. In some instances, substrates comprise a homogenous array surface. For example, the homogenous array surface is a homogenous plate. The term “locus” as used herein refers to a discrete region on a structure which provides support for polynucleotides encoding for a single predetermined sequence to extend from the surface. In some instances, a locus is on a two dimensional surface, e.g., a substantially planar surface. In some instances, a locus is on a three-dimensional surface, e.g., a well, microwell, channel, or post. In some instances, a surface of a locus comprises a material that is actively functionalized to attach to at least one nucleotide for polynucleotide synthesis, or preferably, a population of identical nucleotides for synthesis of a population of polynucleotides. In some instances, polynucleotide refers to a population of polynucleotides encoding for the same nucleic acid sequence. In some cases, a surface of a substrate is inclusive of one or a plurality of surfaces of a substrate. The average error rates for polynucleotides synthesized within a library described here using the systems and methods provided are often less than 1 in 1000, less than about 1 in 2000, less than about 1 in 3000 or less often without error correction.

[0092] Provided herein are surfaces that support the parallel synthesis of a plurality of polynucleotides having different predetermined sequences at addressable locations on a common support. In some instances, a substrate provides support for the synthesis of more than 50, 100, 200, 400, 600, 800, 1000, 1200, 1400, 1600, 1800, 2,000; 5,000; 10,000; 20,000; 50,000; 100,000; 200,000; 300,000; 400,000; 500,000; 600,000; 700,000; 800,000; 900,000; 1,000,000; 1,200,000; 1,400,000; 1,600,000; 1,800,000; 2,000,000; 2,500,000; 3,000,000; 3,500,000; 4,000,000; 4,500,000; 5,000,000; 10,000,000 or more non-identical polynucleotides. In some cases, the surfaces provide support for the synthesis of more than 50, 100, 200, 400, 600, 800, 1000, 1200, 1400, 1600, 1800, 2,000; 5,000; 10,000; 20,000; 50,000; 100,000; 200,000; 300,000; 400,000; 500,000; 600,000; 700,000; 800,000; 900,000; 1,000,000; 1,200,000; 1,400,000; 1,600,000; 1,800,000; 2,000,000; 2,500,000; 3,000,000; 3,500,000; 4,000,000; 4,500,000; 5,000,000; 10,000,000 or more polynucleotides encoding for distinct sequences. In some instances, at least a portion of the polynucleotides have an identical sequence or are configured to be synthesized with an identical sequence. In some instances, the substrate provides a surface environment for the growth of polynucleotides having at least 80, 90, 100, 120, 150, 175, 200, 225, 250, 275, 300, 325, 350, 375, 400, 425, 450, 475, 500 bases or more.

[0093] Provided herein are methods for polynucleotide synthesis on distinct loci of a substrate, wherein each locus supports the synthesis of a population of polynucleotides. In some cases, each locus supports the synthesis of a population of polynucleotides having a different sequence than a population of polynucleotides grown on another locus. In some instances, each polynucleotide sequence is synthesized with 1, 2, 3, 4, 5, 6, 7, 8, 9 or more redundancy across different loci within the same cluster of loci on a surface for polynucleotide synthesis. In some instances, the loci of a substrate are located within a plurality of clusters. In some instances, a substrate comprises at least 10, 500, 1000, 2000, 3000, 4000, 5000, 6000, 7000, 8000, 9000, 10000, 11000, 12000, 13000, 14000, 15000, 20000, 30000, 40000, 50000 or more clusters. In some instances, a substrate comprises more than 2,000; 5,000; 10,000; 100,000; 200,000; 300,000; 400,000; 500,000; 600,000; 700,000; 800,000; 900,000; 1,000,000; 1,100,000; 1,200,000; 1,300,000; 1,400,000; 1,500,000; 1,600,000; 1,700,000; 1,800,000; 1,900,000; 2,000,000; 300,000; 400,000; 500,000; 600,000; 700,000; 800,000; 900,000; 1,000,000; 1,200,000; 1,400,000; 1,600,000; 1,800,000; 2,000,000; 2,500,000; 3,000,000; 3,500,000; 4,000,000; 4,500,000; 5,000,000; or 10,000,000 or more distinct loci. In some instances, a substrate comprises about 10,000 distinct loci. The amount of loci within a single cluster is varied in different instances. In some cases, each cluster includes 1, 2, 3, 4, 5, 6, 7, 8, 9, 10, 20, 30, 40, 50, 60, 70, 80, 90, 100, 120, 130, 150, 200, 300, 400, 500 or more loci. In some instances, each cluster includes about 50-500 loci. In some instances, each cluster includes about 100-200 loci. In some instances, each cluster includes about 100-150 loci. In some instances, each cluster includes about 109, 121, 130 or 137 loci. In some instances, each cluster includes about 19, 20, 61, 64 or more loci. Alternatively or in combination, polynucleotide synthesis occurs on a homogenous array surface.

[0094] In some instances, the number of distinct polynucleotides synthesized on a substrate is dependent on the number of distinct loci available in the substrate. In some instances, the density of loci within a cluster or surface of a substrate is at least or about 1, 10, 25, 50, 65, 75, 100, 130, 150, 175, 200, 300, 400, 500, 1,000 or more loci per mm². In some cases, a substrate comprises 10-500, 25-400, 50-500, 100-500, 150-500, 10-250, 50-250, 10-200, or 50-200 mm². In some instances, the distance between the centers of two adjacent loci within a cluster or surface is from about 10-500, from about 10-200, or from about 10-100 um. In some instances, the distance between two centers of adjacent loci is greater than about 10, 20, 30, 40, 50, 60, 70, 80, 90 or 100 μm. In some instances, the distance between the centers of two adjacent loci is less than about 200, 150, 100, 80, 70, 60, 50, 40, 30, 20 or 10 μm. In some instances, each locus has a width of about 0.5, 1, 2, 3, 4, 5, 6, 7, 8, 9, 10, 20, 30, 40, 50, 60, 70, 80, 90 or 100 μm. In some cases, each locus has a width of about 0.5-100, 0.5-50, 10-75, or 0.5-50 um.

[0095] In some instances, the density of clusters within a substrate is at least or about 1 cluster per 100 mm², 1 cluster per 10 mm², 1 cluster per 5 mm², 1 cluster per 4 mm², 1 cluster per 3 mm², 1 cluster per 2 mm², 1 cluster per 1 mm², 2 clusters per 1 mm², 3 clusters per 1 mm², 4 clusters per 1 mm², 5 clusters per 1 mm², 10 clusters per 1 mm², 50 clusters per 1 mm² or more. In some instances, a substrate comprises from about 1 cluster per 10 mm² to about 10 clusters per 1 mm². In some instances, the distance between the centers of two adjacent clusters is at least or about 50, 100, 200, 500, 1000, 2000, or 5000 μm. In some cases, the distance between the centers of two adjacent clusters is between about 50-100, 50-200, 50-300, 50-500, and 100-2000 um. In some cases, the distance between the centers of two adjacent clusters is between about 0.05-50, 0.05-10, 0.05-5, 0.05-4, 0.05-3, 0.05-2, 0.1-10, 0.2-10, 0.3-10, 0.4-10, 0.5-10, 0.5-5, or 0.5-2 mm. In some cases, each cluster has a cross section of about 0.5 to about 2, about 0.5 to about 1, or about 1 to about 2 mm. In some cases, each cluster has a cross section of about 0.5, 0.6, 0.7, 0.8, 0.9, 1, 1.1, 1.2, 1.3, 1.4, 1.5, 1.6, 1.7, 1.8, 1.9 or 2 mm. In some cases, each cluster has an interior cross section of about 0.5, 0.6, 0.7, 0.8, 0.9, 1, 1.1, 1.15, 1.2, 1.3, 1.4, 1.5, 1.6, 1.7, 1.8, 1.9 or 2 mm.

[0096] In some instances, a substrate is about the size of a standard 96 well plate, for example between about 100 and about 200 mm by between about 50 and about 150 mm. In some instances, a substrate has a diameter less than or equal to about 1000, 500, 450, 400, 300, 250, 200, 150, 100 or 50 mm. In some instances, the diameter of a substrate is between about 25-1000, 25-800, 25-600, 25-500, 25-400, 25-300, or 25-200 mm. In some instances, a substrate has a planar surface area of at least about 100; 200; 500; 1,000; 2,000; 5,000; 10,000; 12,000; 15,000; 20,000; 30,000; 40,000; 50,000 mm² or more. In some instances, the thickness of a substrate is between about 50-2000, 50-1000, 100-1000, 200-1000, or 250-1000 mm.

### Surface Materials

[0097] Substrates, devices, and reactors provided herein are fabricated from any variety of materials suitable for the methods, compositions, and systems described herein. In certain instances, substrate materials are fabricated to exhibit a low level of nucleotide binding. In some instances, substrate materials are modified to generate distinct surfaces that exhibit a high level of nucleotide binding. In some instances, substrate materials are transparent to visible and/or UV light. In some instances, substrate materials are sufficiently conductive, e.g., are able to form uniform electric fields across all or a portion of a substrate. In some instances, conductive materials are connected to an electric ground. In some instances, the substrate is heat conductive or insulated. In some instances, the materials are chemical resistant and heat resistant to support chemical or biochemical reactions, for example polynucleotide synthesis reaction processes. In some instances, a substrate comprises flexible materials. For flexible materials, materials can include, without limitation: nylon, both modified and unmodified, nitrocellulose, polypropylene, and the like. In some instances, a substrate comprises rigid materials. For rigid materials, materials can include, without limitation: glass; fuse silica; silicon, plastics (for example polytetraflouroethylene, polypropylene, polystyrene, polycarbonate, and blends thereof, and the like); metals (for example, gold, platinum, and the like). The substrate, solid support or reactors can be fabricated from a material selected from the group consisting of silicon, polystyrene, agarose, dextran, cellulosic polymers, polyacrylamides, polydimethylsiloxane (PDMS), and glass. The substrates/solid supports or the microstructures, reactors therein may be manufactured with a combination of materials listed herein or any other suitable material known in the art.

### Surface Architecture

[0098] Provided herein are substrates for the methods, compositions, and systems described herein, wherein the substrates have a surface architecture suitable for the methods, compositions, and systems described herein. In some instances, a substrate comprises raised and/or lowered features. One benefit of having such features is an increase in surface area to support polynucleotide synthesis. In some instances, a substrate having raised and/or lowered features is referred to as a three-dimensional substrate. In some cases, a three-dimensional substrate comprises one or more channels. In some cases, one or more loci comprise a channel. In some cases, the channels are accessible to reagent deposition via a deposition device such as a material deposition device. In some cases, reagents and/or fluids collect in a larger well in fluid communication one or more channels. For example, a substrate comprises a plurality of channels corresponding to a plurality of loci with a cluster, and the plurality of channels are in fluid communication with one well of the cluster. In some methods, a library of polynucleotides is synthesized in a plurality of loci of a cluster.

[0099] Provided herein are substrates for the methods, compositions, and systems described herein, wherein the substrates are configured for polynucleotide synthesis. In some instances, the structure is configured to allow for controlled flow and mass transfer paths for polynucleotide synthesis on a surface. In some instances, the configuration of a substrate allows for the controlled and even distribution of mass transfer paths, chemical exposure times, and/or wash efficacy during polynucleotide synthesis. In some instances, the configuration of a substrate allows for increased sweep efficiency, for example by providing sufficient volume for a growing polynucleotide such that the excluded volume by the growing polynucleotide does not take up more than 50, 45, 40, 35, 30, 25, 20, 15, 14, 13, 12, 11, 10, 9, 8, 7, 6, 5, 4, 3, 2, 1%, or less of the initially available volume that is available or suitable for growing the polynucleotide. In some instances, a three-dimensional structure allows for managed flow of fluid to allow for the rapid exchange of chemical exposure.

[0100] Provided herein are substrates for the methods, compositions, and systems described herein, wherein the substrates comprise structures suitable for the methods, compositions, and systems described herein. In some instances, segregation is achieved by physical structure. In some instances, segregation is achieved by differential functionalization of the surface generating active and passive regions for polynucleotide synthesis. In some instances, differential functionalization is achieved by alternating the hydrophobicity across the substrate surface, thereby creating water contact angle effects that cause beading or wetting of the deposited reagents. Employing larger structures can decrease splashing and cross-contamination of distinct polynucleotide synthesis locations with reagents of the neighboring spots. In some cases, a device, such as a material deposition device, is used to deposit reagents to distinct polynucleotide synthesis locations. Substrates having three-dimensional features are configured in a manner that allows for the synthesis of a large number of polynucleotides (e.g., more than about 10,000) with a low error rate (e.g., less than about 1:500, 1:1000, 1:1500, 1:2,000, 1:3,000, 1:5,000, or 1:10,000). In some cases, a substrate comprises features with a density of about or greater than about 1, 5, 10, 20, 30, 40, 50, 60, 70, 80, 100, 110, 120, 130, 140, 150, 160, 170, 180, 190, 200, 300, 400 or 500 features per mm².

[0101] A well of a substrate may have the same or different width, height, and/or volume as another well of the substrate. A channel of a substrate may have the same or different width, height, and/or volume as another channel of the substrate. In some instances, the diameter of a cluster or the diameter of a well comprising a cluster, or both, is between about 0.05-50, 0.05-10, 0.05-5, 0.05-4, 0.05-3, 0.05-2, 0.05-1, 0.05-0.5, 0.05-0.1, 0.1-10, 0.2-10, 0.3-10, 0.4-10, 0.5-10, 0.5-5, or 0.5-2 mm. In some instances, the diameter of a cluster or well or both is less than or about 5, 4, 3, 2, 1, 0.5, 0.1, 0.09, 0.08, 0.07, 0.06, or 0.05 mm. In some instances, the diameter of a cluster or well or both is between about 1.0 and 1.3 mm. In some instances, the diameter of a cluster or well, or both is about 1.150 mm. In some instances, the diameter of a cluster or well, or both is about 0.08 mm. The diameter of a cluster refers to clusters within a two-dimensional or three-dimensional substrate.

[0102] In some instances, the height of a well is from about 20-1000, 50-1000, 100-1000, 200-1000, 300-1000, 400-1000, or 500-1000 um. In some cases, the height of a well is less than about 1000, 900, 800, 700, or 600 um.

[0103] In some instances, a substrate comprises a plurality of channels corresponding to a plurality of loci within a cluster, wherein the height or depth of a channel is 5-500, 5-400, 5-300, 5-200, 5-100, 5-50, or 10-50 um. In some cases, the height of a channel is less than 100, 80, 60, 40, or 20 um.

[0104] In some instances, the diameter of a channel, locus (e.g., in a substantially planar substrate) or both channel and locus (e.g., in a three-dimensional substrate wherein a locus corresponds to a channel) is from about 1-1000, 1-500, 1-200, 1-100, 5-100, or 10-100 um, for example, about 90, 80, 70, 60, 50, 40, 30, 20 or 10 μm. In some instances, the diameter of a channel, locus, or both channel and locus is less than about 100, 90, 80, 70, 60, 50, 40, 30, 20 or 10 μm. In some instances, the distance between the center of two adjacent channels, loci, or channels and loci is from about 1-500, 1-200, 1-100, 5-200, 5-100, 5-50, or 5-30, for example, about 20 um.

### Surface Modifications

[0105] Provided herein are methods for polynucleotide synthesis on a surface, wherein the surface comprises various surface modifications. In some instances, the surface modifications are employed for the chemical and/or physical alteration of a surface by an additive or subtractive process to change one or more chemical and/or physical properties of a substrate surface or a selected site or region of a substrate surface. For example, surface modifications include, without limitation, (1) changing the wetting properties of a surface, (2) functionalizing a surface, i.e., providing, modifying or substituting surface functional groups, (3) defunctionalizing a surface, i.e., removing surface functional groups, (4) otherwise altering the chemical composition of a surface, e.g., through etching, (5) increasing or decreasing surface roughness, (6) providing a coating on a surface, e.g., a coating that exhibits wetting properties that are different from the wetting properties of the surface, and/or (7) depositing particulates on a surface.

[0106] In some cases, the addition of a chemical layer on top of a surface (referred to as adhesion promoter) facilitates structured patterning of loci on a surface of a substrate. Exemplary surfaces for application of adhesion promotion include, without limitation, glass, silicon, silicon dioxide and silicon nitride. In some cases, the adhesion promoter is a chemical with a high surface energy. In some instances, a second chemical layer is deposited on a surface of a substrate. In some cases, the second chemical layer has a low surface energy. In some cases, surface energy of a chemical layer coated on a surface supports localization of droplets on the surface. Depending on the patterning arrangement selected, the proximity of loci and/or area of fluid contact at the loci are alterable.

[0107] In some instances, a substrate surface, or resolved loci, onto which nucleic acids or other moieties are deposited, e.g., for polynucleotide synthesis, are smooth or substantially planar (e.g., two-dimensional) or have irregularities, such as raised or lowered features (e.g., three-dimensional features). In some instances, a substrate surface is modified with one or more different layers of compounds. Such modification layers of interest include, without limitation, inorganic and organic layers such as metals, metal oxides, polymers, small organic molecules and the like.

[0108] In some instances, resolved loci of a substrate are functionalized with one or more moieties that increase and/or decrease surface energy. In some cases, a moiety is chemically inert. In some cases, a moiety is configured to support a desired chemical reaction, for example, one or more processes in a polynucleotide synthesis reaction. The surface energy, or hydrophobicity, of a surface is a factor for determining the affinity of a nucleotide to attach onto the surface. In some instances, a method for substrate functionalization comprises: (a) providing a substrate having a surface that comprises silicon dioxide; and (b) silanizing the surface using, a suitable silanizing agent described herein or otherwise known in the art, for example, an organofunctional alkoxysilane molecule. Methods and functionalizing agents are described in U.S. Pat. No. 5,474,796, which is herein incorporated by reference in its entirety.

[0109] In some instances, a substrate surface is functionalized by contact with a derivatizing composition that contains a mixture of silanes, under reaction conditions effective to couple the silanes to the substrate surface, typically via reactive hydrophilic moieties present on the substrate surface. Silanization generally covers a surface through self-assembly with organofunctional alkoxysilane molecules. A variety of siloxane functionalizing reagents can further be used as currently known in the art, e.g., for lowering or increasing surface energy. The organofunctional alkoxysilanes are classified according to their organic functions.

### Polynucleotide Synthesis

[0110] Methods of the current disclosure for polynucleotide synthesis may include processes involving phosphoramidite chemistry. In some instances, polynucleotide synthesis comprises coupling a base with phosphoramidite. Polynucleotide synthesis may comprise coupling a base by deposition of phosphoramidite under coupling conditions, wherein the same base is optionally deposited with phosphoramidite more than once, i.e., double coupling. Polynucleotide synthesis may comprise capping of unreacted sites. In some instances, capping is optional. Polynucleotide synthesis may also comprise oxidation or an oxidation step or oxidation steps. Polynucleotide synthesis may comprise deblocking, detritylation, and sulfurization. In some instances, polynucleotide synthesis comprises either oxidation or sulfurization. In some instances, between one or each step during a polynucleotide synthesis reaction, the device is washed, for example, using tetrazole or acetonitrile. Time frames for any one step in a phosphoramidite synthesis method may be less than about 2 min, 1 min, 50 sec, 40 sec, 30 sec, 20 sec and 10 sec.

[0111] Polynucleotide synthesis using a phosphoramidite method may comprise a subsequent addition of a phosphoramidite building block (e.g., nucleoside phosphoramidite) to a growing polynucleotide chain for the formation of a phosphite triester linkage. Phosphoramidite polynucleotide synthesis proceeds in the 3′ to 5′ direction. Phosphoramidite polynucleotide synthesis allows for the controlled addition of one nucleotide to a growing nucleic acid chain per synthesis cycle. In some instances, each synthesis cycle comprises a coupling step. Phosphoramidite coupling involves the formation of a phosphite triester linkage between an activated nucleoside phosphoramidite and a nucleoside bound to the substrate, for example, via a linker. In some instances, the nucleoside phosphoramidite is provided to the device activated. In some instances, the nucleoside phosphoramidite is provided to the device with an activator. In some instances, nucleoside phosphoramidites are provided to the device in a 1.5, 2, 3, 4, 5, 6, 7, 8, 9, 10, 11, 12, 13, 14, 15, 16, 17, 18, 19, 20, 25, 30, 35, 40, 50, 60, 70, 80, 90, 100-fold excess or more over the substrate-bound nucleosides. In some instances, the addition of nucleoside phosphoramidite is performed in an anhydrous environment, for example, in anhydrous acetonitrile. Following addition of a nucleoside phosphoramidite, the device is optionally washed. In some instances, the coupling step is repeated one or more additional times, optionally with a wash step between nucleoside phosphoramidite additions to the substrate. In some instances, a polynucleotide synthesis method used herein comprises 1, 2, 3 or more sequential coupling steps. Prior to coupling, in many cases, the nucleoside bound to the device is de-protected by removal of a protecting group, where the protecting group functions to prevent polymerization. A common protecting group is 4,4′-dimethoxytrityl (DMT).

[0112] Following coupling, phosphoramidite polynucleotide synthesis methods optionally comprise a capping step. In a capping step, the growing polynucleotide is treated with a capping agent. A capping step is useful to block unreacted substrate-bound 5′-OH groups after coupling from further chain elongation, preventing the formation of polynucleotides with internal base deletions. Further, phosphoramidites activated with 1H-tetrazole may react, to a small extent, with the O6 position of guanosine. Without being bound by theory, upon oxidation with I₂/water, this side product, possibly via O6-N7 migration, may undergo depurination. The apurinic sites may end up being cleaved in the course of the final deprotection of the polynucleotide thus reducing the yield of the full-length product. The O6 modifications may be removed by treatment with the capping reagent prior to oxidation with I₂/water. In some instances, inclusion of a capping step during polynucleotide synthesis decreases the error rate as compared to synthesis without capping. As an example, the capping step comprises treating the substrate-bound polynucleotide with a mixture of acetic anhydride and 1-methylimidazole. Following a capping step, the device is optionally washed.

[0113] In some instances, following addition of a nucleoside phosphoramidite, and optionally after capping and one or more wash steps, the device bound growing nucleic acid is oxidized. The oxidation step comprises the phosphite triester is oxidized into a tetracoordinated phosphate triester, a protected precursor of the naturally occurring phosphate diester internucleoside linkage. In some instances, oxidation of the growing polynucleotide is achieved by treatment with iodine and water, optionally in the presence of a weak base (e.g., pyridine, lutidine, collidine). Oxidation may be carried out under anhydrous conditions using, e.g. tert-Butyl hydroperoxide or (1S)-(+)-(10-camphorsulfonyl)-oxaziridine (CSO). In some methods, a capping step is performed following oxidation. A second capping step allows for device drying, as residual water from oxidation that may persist can inhibit subsequent coupling. Following oxidation, the device and growing polynucleotide is optionally washed. In some instances, the step of oxidation is substituted with a sulfurization step to obtain polynucleotide phosphorothioates, wherein any capping steps can be performed after the sulfurization. Many reagents are capable of the efficient sulfur transfer, including but not limited to 3-(Dimethylaminomethylidene)amino)-3H-1,2,4-dithiazole-3-thione, DDTT, 3H-1,2-benzodithiol-3-one 1,1-dioxide, also known as Beaucage reagent, and N,N,N′N′-Tetraethylthiuram disulfide (TETD).

[0114] In order for a subsequent cycle of nucleoside incorporation to occur through coupling, the protected 5′ end of the device bound growing polynucleotide is removed so that the primary hydroxyl group is reactive with a next nucleoside phosphoramidite. In some instances, the protecting group is DMT and deblocking occurs with trichloroacetic acid in dichloromethane. Conducting detritylation for an extended time or with stronger than recommended solutions of acids may lead to increased depurination of solid support-bound polynucleotide and thus reduces the yield of the desired full-length product. Methods and compositions of the disclosure described herein provide for controlled deblocking conditions limiting undesired depurination reactions. In some instances, the device bound polynucleotide is washed after deblocking. In some instances, efficient washing after deblocking contributes to synthesized polynucleotides having a low error rate.

[0115] Methods for the synthesis of polynucleotides typically involve an iterating sequence of the following steps: application of a protected monomer to an actively functionalized surface (e.g., locus) to link with either the activated surface, a linker or with a previously deprotected monomer; deprotection of the applied monomer so that it is reactive with a subsequently applied protected monomer; and application of another protected monomer for linking. One or more intermediate steps include oxidation or sulfurization. In some instances, one or more wash steps precede or follow one or all of the steps.

[0116] Methods for phosphoramidite-based polynucleotide synthesis comprise a series of chemical steps. In some instances, one or more steps of a synthesis method involve reagent cycling, where one or more steps of the method comprise application to the device of a reagent useful for the step. For example, reagents are cycled by a series of liquid deposition and vacuum drying steps. For substrates comprising three-dimensional features such as wells, microwells, channels and the like, reagents are optionally passed through one or more regions of the device via the wells and/or channels.

[0117] Methods and systems described herein relate to polynucleotide synthesis devices for the synthesis of polynucleotides. The synthesis may be in parallel. For example, at least or about at least 2, 3, 4, 5, 6, 7, 8, 9, 10, 11, 12, 13, 14, 15, 16, 17, 18, 19, 20, 21, 22, 23, 24, 25, 30, 35, 40, 45, 50, 100, 150, 200, 250, 300, 350, 400, 450, 500, 550, 600, 650, 700, 750, 800, 850, 900, 1000, 10000, 50000, 75000, 100000 or more polynucleotides can be synthesized in parallel. The total number polynucleotides that may be synthesized in parallel may be from 2-100000, 3-50000, 4-10000, 5-1000, 6-900, 7-850, 8-800, 9-750, 10-700, 11-650, 12-600, 13-550, 14-500, 15-450, 16-400, 17-350, 18-300, 19-250, 20-200, 21-150, 22-100, 23-50, 24-45, 25-40, 30-35. Those of skill in the art appreciate that the total number of polynucleotides synthesized in parallel may fall within any range bound by any of these values, for example 25-100. The total number of polynucleotides synthesized in parallel may fall within any range defined by any of the values serving as endpoints of the range. Total molar mass of polynucleotides synthesized within the device or the molar mass of each of the polynucleotides may be at least or at least about 10, 20, 30, 40, 50, 100, 250, 500, 750, 1000, 2000, 3000, 4000, 5000, 6000, 7000, 8000, 9000, 10000, 25000, 50000, 75000, 100000 picomoles, or more. The length of each of the polynucleotides or average length of the polynucleotides within the device may be at least or about at least 10, 15, 20, 25, 30, 35, 40, 45, 50, 100, 150, 200, 300, 400, 500 nucleotides, or more. The length of each of the polynucleotides or average length of the polynucleotides within the device may be at most or about at most 500, 400, 300, 200, 150, 100, 50, 45, 35, 30, 25, 20, 19, 18, 17, 16, 15, 14, 13, 12, 11, 10 nucleotides, or less. The length of each of the polynucleotides or average length of the polynucleotides within the device may fall from 10-500, 9-400, 11-300, 12-200, 13-150, 14-100, 15-50, 16-45, 17-40, 18-35, 19-25. Those of skill in the art appreciate that the length of each of the polynucleotides or average length of the polynucleotides within the device may fall within any range bound by any of these values, for example 100-300. The length of each of the polynucleotides or average length of the polynucleotides within the device may fall within any range defined by any of the values serving as endpoints of the range.

[0118] Methods for polynucleotide synthesis on a surface provided herein allow for synthesis at a fast rate. As an example, at least 3, 4, 5, 6, 7, 8, 9, 10, 11, 12, 13, 14, 15, 16, 17, 18, 19, 20, 21, 22, 23, 24, 25, 26, 27, 28, 29, 30, 35, 40, 45, 50, 55, 60, 70, 80, 90, 100, 125, 150, 175, 200 nucleotides per hour, or more are synthesized. Nucleotides include adenine, guanine, thymine, cytosine, uridine building blocks, or analogs/modified versions thereof. In some instances, libraries of polynucleotides are synthesized in parallel on substrate. For example, a device comprising about or at least about 100; 1,000; 10,000; 30,000; 75,000; 100,000; 1,000,000; 2,000,000; 3,000,000; 4,000,000; or 5,000,000 resolved loci is able to support the synthesis of at least the same number of distinct polynucleotides, wherein polynucleotide encoding a distinct sequence is synthesized on a resolved locus. In some instances, a library of polynucleotides is synthesized on a device with low error rates described herein in less than about three months, two months, one month, three weeks, 15, 14, 13, 12, 11, 10, 9, 8, 7, 6, 5, 4, 3, 2 days, 24 hours or less. In some instances, larger nucleic acids assembled from a polynucleotide library synthesized with low error rate using the substrates and methods described herein are prepared in less than about three months, two months, one month, three weeks, 15, 14, 13, 12, 11, 10, 9, 8, 7, 6, 5, 4, 3, 2 days, 24 hours or less.

[0119] In some instances, methods described herein provide for generation of a library of nucleic acids comprising variant nucleic acids differing at a plurality of codon sites. In some instances, a nucleic acid may have 1 site, 2 sites, 3 sites, 4 sites, 5 sites, 6 sites, 7 sites, 8 sites, 9 sites, 10 sites, 11 sites, 12 sites, 13 sites, 14 sites, 15 sites, 16 sites, 17 sites 18 sites, 19 sites, 20 sites, 30 sites, 40 sites, 50 sites, or more of variant codon sites.

[0120] In some instances, the one or more sites of variant codon sites may be adjacent. In some instances, the one or more sites of variant codon sites may not be adjacent and separated by 1, 2, 3, 4, 5, 6, 7, 8, 9, 10, or more codons.

[0121] In some instances, a nucleic acid may comprise multiple sites of variant codon sites, wherein all the variant codon sites are adjacent to one another, forming a stretch of variant codon sites. In some instances, a nucleic acid may comprise multiple sites of variant codon sites, wherein none the variant codon sites are adjacent to one another. In some instances, a nucleic acid may comprise multiple sites of variant codon sites, wherein some the variant codon sites are adjacent to one another, forming a stretch of variant codon sites, and some of the variant codon sites are not adjacent to one another.

[0122] Referring to the Figures, FIG. 1 illustrates an exemplary process workflow for synthesis of nucleic acids (e.g., genes) from shorter nucleic acids. The workflow is divided generally into phases: (1) de novo synthesis of a single stranded nucleic acid library, (2) joining nucleic acids to form larger fragments, (3) error correction, (4) quality control, and (5) shipment. Prior to de novo synthesis, an intended nucleic acid sequence or group of nucleic acid sequences is preselected. For example, a group of genes is preselected for generation.

[0123] Once large nucleic acids for generation are selected, a predetermined library of nucleic acids is designed for de novo synthesis. Various suitable methods are known for generating high density polynucleotide arrays. In the workflow example, a device surface layer is provided. In the example, chemistry of the surface is altered in order to improve the polynucleotide synthesis process. Areas of low surface energy are generated to repel liquid while areas of high surface energy are generated to attract liquids. The surface itself may be in the form of a planar surface or contain variations in shape, such as protrusions or microwells which increase surface area. In the workflow example, high surface energy molecules selected serve a dual function of supporting DNA chemistry, as disclosed in International Patent Application Publication WO/2015/021080, which is herein incorporated by reference in its entirety.

[0124] In situ preparation of polynucleotide arrays is generated on a solid support and utilizes single nucleotide extension process to extend multiple oligomers in parallel. A deposition device, such as a material deposition device, is designed to release reagents in a step wise fashion such that multiple polynucleotides extend, in parallel, one residue at a time to generate oligomers with a predetermined nucleic acid sequence 102. In some instances, polynucleotides are cleaved from the surface at this stage. Cleavage includes gas cleavage, e.g., with ammonia or methylamine.

[0125] The generated polynucleotide libraries are placed in a reaction chamber. In this exemplary workflow, the reaction chamber (also referred to as “nanoreactor”) is a silicon coated well, containing PCR reagents and lowered onto the polynucleotide library 103. Prior to or after the sealing 104 of the polynucleotides, a reagent is added to release the polynucleotides from the substrate. In the exemplary workflow, the polynucleotides are released subsequent to sealing of the nanoreactor 105. Once released, fragments of single stranded polynucleotides hybridize in order to span an entire long range sequence of DNA. Partial hybridization 105 is possible because each synthesized polynucleotide is designed to have a small portion overlapping with at least one other polynucleotide in the pool.

[0126] After hybridization, a PCA reaction is commenced. During the polymerase cycles, the polynucleotides anneal to complementary fragments and gaps are filled in by a polymerase. Each cycle increases the length of various fragments randomly depending on which polynucleotides find each other. Complementarity amongst the fragments allows for forming a complete large span of double stranded DNA 106.

[0127] After PCA is complete, the nanoreactor is separated from the device 107 and positioned for interaction with a device having primers for PCR 108. After sealing, the nanoreactor is subject to PCR 109 and the larger nucleic acids are amplified. After PCR 110, the nanochamber is opened 111, error correction reagents are added 112, the chamber is sealed 113 and an error correction reaction occurs to remove mismatched base pairs and/or strands with poor complementarity from the double stranded PCR amplification products 114. The nanoreactor is opened and separated 115. Error corrected product is next subject to additional processing steps, such as PCR and molecular bar coding, and then packaged 122 for shipment 123.

[0128] In some instances, quality control measures are taken. After error correction, quality control steps include for example interaction with a wafer having sequencing primers for amplification of the error corrected product 116, sealing the wafer to a chamber containing error corrected amplification product 117, and performing an additional round of amplification 118. The nanoreactor is opened 119 and the products are pooled 120 and sequenced 121. After an acceptable quality control determination is made, the packaged product 122 is approved for shipment 123.

[0129] In some instances, a nucleic acid generated by a workflow such as that in FIG. 1 is subject to mutagenesis using overlapping primers disclosed herein. In some instances, a library of primers are generated by in situ preparation on a solid support and utilize single nucleotide extension process to extend multiple oligomers in parallel. A deposition device, such as a material deposition device, is designed to release reagents in a step wise fashion such that multiple polynucleotides extend, in parallel, one residue at a time to generate oligomers with a predetermined nucleic acid sequence 102.

### Computer Systems

[0130] Any of the systems described herein, may be operably linked to a computer and may be automated through a computer either locally or remotely. In various instances, the methods and systems of the disclosure may further comprise software programs on computer systems and use thereof. Accordingly, computerized control for the synchronization of the dispense/vacuum/refill functions such as orchestrating and synchronizing the material deposition device movement, dispense action and vacuum actuation are within the bounds of the disclosure. The computer systems may be programmed to interface between the user specified base sequence and the position of a material deposition device to deliver the correct reagents to specified regions of the substrate.

[0131] The computer system 200 illustrated in FIG. 2 may be understood as a logical apparatus that can read instructions from media 211 and/or a network port 205, which can optionally be connected to server 209 having fixed media 212. The system, such as shown in FIG. 2 can include a CPU 201, disk drives 203, optional input devices such as keyboard 215 and/or mouse 216 and optional monitor 207. Data communication can be achieved through the indicated communication medium to a server at a local or a remote location. The communication medium can include any means of transmitting and/or receiving data. For example, the communication medium can be a network connection, a wireless connection or an internet connection. Such a connection can provide for communication over the World Wide Web. It is envisioned that data relating to the present disclosure can be transmitted over such networks or connections for reception and/or review by a party 222 as illustrated in FIG. 2.

[0132] As illustrated in FIG. 3, a high speed cache 304 can be connected to, or incorporated in, the processor 302 to provide a high speed memory for instructions or data that have been recently, or are frequently, used by processor 302. The processor 302 is connected to a north bridge 306 by a processor bus 308. The north bridge 306 is connected to random access memory (RAM) 310 by a memory bus 312 and manages access to the RAM 310 by the processor 302. The north bridge 306 is also connected to a south bridge 314 by a chipset bus 316. The south bridge 314 is, in turn, connected to a peripheral bus 318. The peripheral bus can be, for example, PCI, PCI-X, PCI Express, or other peripheral bus. The north bridge and south bridge are often referred to as a processor chipset and manage data transfer between the processor, RAM, and peripheral components on the peripheral bus 318. In some alternative architectures, the functionality of the north bridge can be incorporated into the processor instead of using a separate north bridge chip. In some instances, system 300 can include an accelerator card 322 attached to the peripheral bus 318. The accelerator can include field programmable gate arrays (FPGAs) or other hardware for accelerating certain processing. For example, an accelerator can be used for adaptive data restructuring or to evaluate algebraic expressions used in extended set processing.

[0133] Software and data are stored in external storage 324 and can be loaded into RAM 310 and/or cache 304 for use by the processor. The system 300 includes an operating system for managing system resources; non-limiting examples of operating systems include: Linux, Windows™, MACOS™, BlackBerry OS™, iOS™, and other functionally-equivalent operating systems, as well as application software running on top of the operating system for managing data storage and optimization in accordance with example instances of the present disclosure. In this example, system 300 also includes network interface cards (NICs) 320 and 321 connected to the peripheral bus for providing network interfaces to external storage, such as Network Attached Storage (NAS) and other computer systems that can be used for distributed parallel processing.

[0134] FIG. 4 is a diagram showing a network 400 with a plurality of computer systems 402a, and 402b, a plurality of cell phones and personal data assistants 402c, and Network Attached Storage (NAS) 404a, and 404b. In example instances, systems 402a, 402b, and 402c can manage data storage and optimize data access for data stored in Network Attached Storage (NAS) 404a and 404b. A mathematical model can be used for the data and be evaluated using distributed parallel processing across computer systems 402a, and 402b, and cell phone and personal data assistant systems 402c. Computer systems 402a, and 402b, and cell phone and personal data assistant systems 402c can also provide parallel processing for adaptive data restructuring of the data stored in Network Attached Storage (NAS) 404a and 404b. FIG. 4 illustrates an example only, and a wide variety of other computer architectures and systems can be used in conjunction with the various instances of the present disclosure. For example, a blade server can be used to provide parallel processing. Processor blades can be connected through a back plane to provide parallel processing. Storage can also be connected to the back plane or as Network Attached Storage (NAS) through a separate network interface. In some example instances, processors can maintain separate memory spaces and transmit data through network interfaces, back plane or other connectors for parallel processing by other processors. In other instances, some or all of the processors can use a shared virtual address memory space.

[0135] FIG. 5 is a block diagram of a multiprocessor computer system 500 using a shared virtual address memory space in accordance with an example instance. The system includes a plurality of processors 502a-f that can access a shared memory subsystem 504. The system incorporates a plurality of programmable hardware memory algorithm processors (MAPs) 506a-f in the memory subsystem 504. Each MAP 506a-f can comprise a memory 508a-f and one or more field programmable gate arrays (FPGAs) 510a-f. The MAP provides a configurable functional unit and particular algorithms or portions of algorithms can be provided to the FPGAs 510a-f for processing in close coordination with a respective processor. For example, the MAPs can be used to evaluate algebraic expressions regarding the data model and to perform adaptive data restructuring in example instances. In this example, each MAP is globally accessible by all of the processors for these purposes. In one configuration, each MAP can use Direct Memory Access (DMA) to access an associated memory 508a-f, allowing it to execute tasks independently of, and asynchronously from the respective microprocessor 502a-f. In this configuration, a MAP can feed results directly to another MAP for pipelining and parallel execution of algorithms.

[0136] The above computer architectures and systems are examples only, and a wide variety of other computer, cell phone, and personal data assistant architectures and systems can be used in connection with example instances, including systems using any combination of general processors, co-processors, FPGAs and other programmable logic devices, system on chips (SOCs), application specific integrated circuits (ASICs), and other processing and logic elements. In some instances, all or part of the computer system can be implemented in software or hardware. Any variety of data storage media can be used in connection with example instances, including random access memory, hard drives, flash memory, tape drives, disk arrays, Network Attached Storage (NAS) and other local or distributed data storage devices and systems.

[0137] In example instances, the computer system can be implemented using software modules executing on any of the above or other computer architectures and systems. In other instances, the functions of the system can be implemented partially or completely in firmware, programmable logic devices such as field programmable gate arrays (FPGAs) as referenced in FIG. 3, system on chips (SOCs), application specific integrated circuits (ASICs), or other processing and logic elements. For example, the Set Processor and Optimizer can be implemented with hardware acceleration through the use of a hardware accelerator card, such as accelerator card 322 illustrated in FIG. 3.

[0138] The following examples are set forth to illustrate more clearly the principle and practice of embodiments disclosed herein to those skilled in the art and are not to be construed as limiting the scope of any claimed embodiments. Unless otherwise stated, all parts and percentages are on a weight basis.

### Examples

[0139] The following examples are given for the purpose of illustrating various embodiments of the disclosure and are not meant to limit the present disclosure in any fashion. The present examples, along with the methods described herein are presently representative of preferred embodiments, are exemplary, and are not intended as limitations on the scope of the disclosure. Changes therein and other uses which are encompassed within the spirit of the disclosure as defined by the scope of the claims will occur to those skilled in the art.

### Example 1: Functionalization of a Device Surface

[0140] A device was functionalized to support the attachment and synthesis of a library of polynucleotides. The device surface was first wet cleaned using a piranha solution comprising 90% H₂SO₄ and 10% H₂O₂ for 20 minutes. The device was rinsed in several beakers with DI water, held under a DI water gooseneck faucet for 5 min, and dried with N₂. The device was subsequently soaked in NH₄OH (1:100; 3 mL:300 mL) for 5 min, rinsed with DI water using a handgun, soaked in three successive beakers with DI water for 1 min each, and then rinsed again with DI water using the handgun. The device was then plasma cleaned by exposing the device surface to O₂. A SAMCO PC-300 instrument was used to plasma etch O₂ at 250 watts for 1 min in downstream mode.

[0141] The cleaned device surface was actively functionalized with a solution comprising N-(3-triethoxysilylpropyl)-4-hydroxybutyramide using a YES-1224P vapor deposition oven system with the following parameters: 0.5 to 1 torr, 60 min, 70° C., 135° C. vaporizer. The device surface was resist coated using a Brewer Science 200× spin coater. SPR™ 3612 photoresist was spin coated on the device at 2500 rpm for 40 sec. The device was pre-baked for 30 min at 90° C. on a Brewer hot plate. The device was subjected to photolithography using a Karl Suss MA6 mask aligner instrument. The device was exposed for 2.2 sec and developed for 1 min in MSF 26A. Remaining developer was rinsed with the handgun and the device soaked in water for 5 min. The device was baked for 30 min at 100° C. in the oven, followed by visual inspection for lithography defects using a Nikon L200. A descum process was used to remove residual resist using the SAMCO PC-300 instrument to O₂ plasma etch at 250 watts for 1 min.

[0142] The device surface was passively functionalized with a 100 μL solution of perfluorooctyltrichlorosilane mixed with 10 μL light mineral oil. The device was placed in a chamber, pumped for 10 min, and then the valve was closed to the pump and left to stand for 10 min. The chamber was vented to air. The device was resist stripped by performing two soaks for 5 min in 500 mL NMP at 70° C. with ultrasonication at maximum power (9 on Crest system). The device was then soaked for 5 min in 500 mL isopropanol at room temperature with ultrasonication at maximum power. The device was dipped in 300 mL of 200 proof ethanol and blown dry with N₂. The functionalized surface was activated to serve as a support for polynucleotide synthesis.

### Example 2: Synthesis of a 50-Mer Sequence on an Oligonucleotide Synthesis Device

[0143] A two-dimensional oligonucleotide synthesis device was assembled into a flowcell, which was connected to a flowcell (Applied Biosystems (ABI394 DNA Synthesizer”). The two-dimensional oligonucleotide synthesis device was uniformly functionalized with N-(3-TRIETHOXYSILYLPROPYL)-4-HYDROXYBUTYRAMIDE (Gelest) was used to synthesize an exemplary polynucleotide of 50 bp (“50-mer polynucleotide”) using polynucleotide synthesis methods described herein.

[0144] The sequence of the 50-mer was as described in SEQ ID NO.: 104. 5′AGACAATCAACCATTTGGGGTGGACAGCCTTGACCTCTAGACTTCGGCAT ##TTTTT TTTTT3′ (SEQ ID NO.: 104), where #denotes Thymidine-succinyl hexamide CED phosphoramidite (CLP-2244 from ChemGenes), which is a cleavable linker enabling the release of oligos from the surface during deprotection.

[0145] The synthesis was done using standard DNA synthesis chemistry (coupling, capping, oxidation, and deblocking) according to the protocol in Table 2 and an ABI synthesizer.

TABLE 2
Table 2: Synthesis protocols

| General DNA Synthesis | | Time |
|---|---|---|
| Process Name | Process Step | (sec) |
| WASH (Acetonitrile Wash | Acetonitrile System Flush | 4 |
| Flow) | Acetonitrile to Flowcell | 23 |
| | N2 System Flush | 4 |
| | Acetonitrile System Flush | 4 |
| DNA BASE ADDITION | Activator Manifold Flush | 2 |
| (Phosphoramidite + | Activator to Flowcell | 6 |
| Activator Flow) | Activator + | 6 |
| | Phosphoramidite to | |
| | Flowcell | |
| | Activator to Flowcell | 0.5 |
| | Activator + | 5 |
| | Phosphoramidite to | |
| | Flowcell | |
| | Activator to Flowcell | 0.5 |
| | Activator + | 5 |
| | Phosphoramidite to | |
| | Flowcell | |
| | Activator to Flowcell | 0.5 |
| | Activator + | 5 |
| | Phosphoramidite to | |
| | Flowcell | |
| | Incubate for 25 sec | 25 |
| WASH (Acetonitrile Wash | Acetonitrile System Flush | 4 |
| Flow) | Acetonitrile to Flowcell | 15 |
| | N2 System Flush | 4 |
| | Acetonitrile System Flush | 4 |
| DNA BASE ADDITION | Activator Manifold Flush | 2 |
| (Phosphoramidite + | Activator to Flowcell | 5 |
| Activator Flow) | Activator + | 18 |
| | Phosphoramidite to | |
| | Flowcell | |
| | Incubate for 25 sec | 25 |
| WASH (Acetonitrile Wash | Acetonitrile System Flush | 4 |
| Flow) | Acetonitrile to Flowcell | 15 |
| | N2 System Flush | 4 |
| | Acetonitrile System Flush | 4 |
| CAPPING (CapA + B, 1:1, | CapA + B to Flowcell | 15 |
| Flow) | | |
| WASH (Acetonitrile Wash | Acetonitrile System Flush | 4 |
| Flow) | Acetonitrile to Flowcell | 15 |
| | Acetonitrile System Flush | 4 |
| OXIDATION (Oxidizer | Oxidizer to Flowcell | 18 |
| Flow) | | |
| WASH (Acetonitrile Wash | Acetonitrile System Flush | 4 |
| Flow) | N2 System Flush | 4 |
| | Acetonitrile System Flush | 4 |
| | Acetonitrile to Flowcell | 15 |
| | Acetonitrile System Flush | 4 |
| | Acetonitrile to Flowcell | 15 |
| | N2 System Flush | 4 |
| | Acetonitrile System Flush | 4 |
| | Acetonitrile to Flowcell | 23 |
| | N2 System Flush | 4 |
| | Acetonitrile System Flush | 4 |
| DEBLOCKING (Deblock | Deblock to Flowcell | 36 |
| Flow) | | |
| WASH (Acetonitrile Wash | Acetonitrile System Flush | 4 |
| Flow) | N2 System Flush | 4 |
| | Acetonitrile System Flush | 4 |
| | Acetonitrile to Flowcell | 18 |
| | N2 System Flush | 4.13 |
| | Acetonitrile System Flush | 4.13 |
| | Acetonitrile to Flowcell | 15 |

[0146] The phosphoramidite/activator combination was delivered similar to the delivery of bulk reagents through the flowcell. No drying steps were performed as the environment stays “wet” with reagent the entire time.

[0147] The flow restrictor was removed from the ABI 394 synthesizer to enable faster flow. Without flow restrictor, flow rates for amidites (0.1M in ACN), Activator, (0.25M Benzoylthiotetrazole (“BTT”; 30-3070-xx from GlenResearch) in ACN), and Ox (0.02M 12 in 20% pyridine, 10% water, and 70% THF) were roughly ˜100 uL/sec, for acetonitrile (“ACN”) and capping reagents (1:1 mix of CapA and CapB, wherein CapA is acetic anhydride in THF/Pyridine and CapB is 16% 1-methylimidizole in THF), roughly ˜200 uL/sec, and for Deblock (3% dichloroacetic acid in toluene), roughly ˜300 uL/sec (compared to ˜50 uL/sec for all reagents with flow restrictor). The time to completely push out Oxidizer was observed, the timing for chemical flow times was adjusted accordingly and an extra ACN wash was introduced between different chemicals. After polynucleotide synthesis, the chip was deprotected in gaseous ammonia overnight at 75 psi. Five drops of water were applied to the surface to recover polynucleotides. The recovered polynucleotides were then analyzed on a BioAnalyzer small RNA chip.

### Example 3: Synthesis of a 100-Mer Sequence on an Oligonucleotide Synthesis Device

[0148] The same process as described in Example 2 for the synthesis of the 50-mer sequence was used for the synthesis of a 100-mer polynucleotide (“100-mer polynucleotide”; 5′ CGGGATCCTTATCGTCATCGTCGTACAGATCCCGACCCATTTGCTGTCCACCAGTCA TGCTAGCCATACCATGATGATGATGATGATGAGAACCCCGCAT ##TTTTTTTTTT3′, where #denotes Thymidine-succinyl hexamide CED phosphoramidite (CLP-2244 from ChemGenes); SEQ ID NO.: 105) on two different silicon chips, the first one uniformly functionalized with N-(3-TRIETHOXYSILYLPROPYL)-4-HYDROXYBUTYRAMIDE and the second one functionalized with 5/95 mix of 11-acetoxyundecyltriethoxysilane and n-decyltriethoxysilane, and the polynucleotides extracted from the surface were analyzed on a BioAnalyzer instrument.

[0149] All ten samples from the two chips were further PCR amplified using a forward (5′ATGCGGGGTTCTCATCATC3′; SEQ ID NO.: 106) and a reverse (5′CGGGATCCTTATCGTCATCG3′; SEQ ID NO.: 107) primer in a 50 uL PCR mix (25 uL NEB Q5 mastermix, 2.5 uL 10 uM Forward primer, 2.5 uL 10 uM Reverse primer, 1 uL polynucleotide extracted from the surface, and water up to 50 uL) using the following thermalcycling program:
[0150] 98° C., 30 sec
[0151] 98° C., 10 sec; 63° C., 10 sec; 72° C., 10 sec; repeat 12 cycles
[0152] 72° C., 2 min

[0153] The PCR products were also run on a BioAnalyzer, demonstrating sharp peaks at the 100-mer position. Next, the PCR amplified samples were cloned, and Sanger sequenced. Table 3 summarizes the results from the Sanger sequencing for samples taken from spots 1-5 from chip 1 and for samples taken from spots 6-10 from chip 2.

TABLE 3
Sequencing results

| | | |
|---|---|---|
| Spot | Error rate | Cycle efficiency |

| | | | |
|---|---|---|---|
| 1 | 1/763 | bp | 99.87% |
| 2 | 1/824 | bp | 99.88% |
| 3 | 1/780 | bp | 99.87% |
| 4 | 1/429 | bp | 99.77% |
| 5 | 1/1525 | bp | 99.93% |
| 6 | 1/1615 | bp | 99.94% |
| 7 | 1/531 | bp | 99.81% |
| 8 | 1/1769 | bp | 99.94% |
| 9 | 1/854 | bp | 99.88% |
| 10 | 1/1451 | bp | 99.93% |

[0154] Thus, the high quality and uniformity of the synthesized polynucleotides were repeated on two chips with different surface chemistries. Overall, 89% of the 100-mers that were sequenced were perfect sequences with no errors, corresponding to 233 out of 262.

[0155] Table 4 summarizes error characteristics for the sequences obtained from the polynucleotide samples from spots 1-10.

TABLE 4
Error characteristics

| | Sample ID/Spot no. | | | | | | | | | |
|---|---|---|---|---|---|---|---|---|---|---|
| | OSA_{—} | OSA_{—} | OSA_{—} | OSA_{—} | OSA_{—} | OSA_{—} | OSA_{—} | OSA_{—} | OSA_{—} | OSA_{—} |
| | 0046/1 | 0047/2 | 0048/3 | 0049/4 | 0050/5 | 0051/6 | 0052/7 | 0053/8 | 0054/9 | 0055/10 |
| Total | 32 | 32 | 32 | 32 | 32 | 32 | 32 | 32 | 32 | 32 |
| Sequences | | | | | | | | | | |
| Sequencing | 25 of 28 | 27 of 27 | 26 of 30 | 21 of 23 | 25 of 26 | 29 of 30 | 27 of 31 | 29 of 31 | 28 of 29 | 25 of 28 |
| Quality | | | | | | | | | | |
| Oligo | 23 of 25 | 25 of 27 | 22 of 26 | 18 of 21 | 24 of 25 | 25 of 29 | 22 of 27 | 28 of 29 | 26 of 28 | 20 of 25 |
| Quality | | | | | | | | | | |
| ROI | 2500 | 2698 | 2561 | 2122 | 2499 | 2666 | 2625 | 2899 | 2798 | 2348 |
| Match | | | | | | | | | | |
| Count | | | | | | | | | | |
| ROI | 2 | 2 | 1 | 3 | 1 | 0 | 2 | 1 | 2 | 1 |
| Mutation | | | | | | | | | | |
| ROI Multi | 0 | 0 | 0 | 0 | 0 | 0 | 0 | 0 | 0 | 0 |
| Base | | | | | | | | | | |
| Deletion | | | | | | | | | | |
| ROI Small | 1 | 0 | 0 | 0 | 0 | 0 | 0 | 0 | 0 | 0 |
| Insertion | | | | | | | | | | |
| ROI | 0 | 0 | 0 | 0 | 0 | 0 | 0 | 0 | 0 | 0 |
| Single | | | | | | | | | | |
| Base | | | | | | | | | | |
| Deletion | | | | | | | | | | |
| Large | 0 | 0 | 1 | 0 | 0 | 1 | 1 | 0 | 0 | 0 |
| Deletion | | | | | | | | | | |
| Count | | | | | | | | | | |
| Mutation: | 2 | 2 | 1 | 2 | 1 | 0 | 2 | 1 | 2 | 1 |
| G > A | | | | | | | | | | |
| Mutation: | 0 | 0 | 0 | 1 | 0 | 0 | 0 | 0 | 0 | 0 |
| T > C | | | | | | | | | | |
| ROI Error | 3 | 2 | 2 | 3 | 1 | 1 | 3 | 1 | 2 | 1 |
| Count | | | | | | | | | | |
| ROI Error | Err: ~1 | Err: ~1 | Err: ~1 | Err: ~1 | Err: ~1 | Err: ~1 | Err: ~1 | Err: ~1 | Err: ~1 | Err: ~1 |
| Rate | in 834 | in 1350 | in 1282 | in 708 | in 2500 | in 2667 | in 876 | in 2900 | in 1400 | in 2349 |
| ROI | MP | MP | MP | MP | MP | MP | MP | MP | MP | MP |
| Minus | Err: ~1 | Err: ~1 | Err: ~1 | Err: ~1 | Err: ~1 | Err: ~1 | Err: ~1 | Err: ~1 | Err: ~1 | Err: ~1 |
| Primer | in 763 | in 824 | in 780 | in 429 | in 1525 | in 1615 | in 531 | in 1769 | in 854 | in 1451 |
| Error Rate | | | | | | | | | | |

### Example 4: VHH Libraries

[0156] Synthetic VHH libraries were developed. For the ‘VHH Ratio’ library with tailored CDR diversity, 2391 VHH sequences (iCAN database) were aligned using Clustal Omega to determine the consensus at each position and the framework was derived from the consensus at each position. The CDRs of all of the 2391 sequences were analyzed for position-specific variation, and this diversity was introduced in the library design. For the ‘VHH Shuffle’ library with shuffled CDR diversity, the iCAN database was scanned for unique CDRs in the nanobody sequences. 1239 unique CDR1's, 1600 unique CDR2's, and 1608 unique CDR3's were identified and the framework was derived from the consensus at each framework position amongst the 2391 sequences in the iCAN database. Each of the unique CDR's was individually synthesized and shuffled in the consensus framework to generate a library with theoretical diversity of 3.2×10\hat{ }9. The library was then cloned in the phagemid vector using restriction enzyme digest. For the ‘VHH hShuffle’ library (a synthetic “human” VHH library with shuffled CDR diversity), the iCAN database was scanned for unique CDRs in the nanobody sequences. 1239 unique CDR1's, 1600 unique CDR2's, and 1608 unique CDR3's were identified and framework 1, 3, and 4 was derived from the human germline DP-47 framework. Framework 2 was derived from the consensus at each framework position amongst the 2391 sequences in the iCAN database. Each of the unique CDR's was individually synthesized and shuffled in the partially humanized framework using the NUGE tool to generate a library with theoretical diversity of 3.2×10\hat{ }9. The library was then cloned in the phagemid vector using the NUGE tool.

[0157] The Carterra SPR system was used to assess binding affinity and affinity distribution for VHH-Fc variants. VHH-Fc demonstrate a range of affinities for TIGIT, with a low end of 12 nM K_{D} and a high end of 1685 nM K_{D} (data not shown). Table 5A provides specific values for the VHH-Fc clones for ELISA, Protein A (mg/ml), and K_{D} (nM). FIG. 7A and FIG. 7B depict TIGIT affinity distribution for the VHH libraries, over the 20-4000 affinity threshold (FIG. 7A; monovalent KD) and the 20-1000 affinity threshold (FIG. 7B; monovalent KD). Out of the 140 VHH binders tested, 51 variants had affinity <100 nM, and 90 variants had affinity <200 nM. FIG. 8 shows data of CDR3 counts per length for the ‘VHH ratio’ library, the ‘VHH shuffle library,’ and the ‘VHH hShuffle library.’ Table 5B shows number of TIGIT unique clones and TIGIT binders for the ‘VHH ratio’ library, the ‘VHH shuffle library,’ and the ‘VHH hShuffle library.’

TABLE 5A

| | | | ProA | K_{D} |
|---|---|---|---|---|
| Clone | ELISA | Library | (mg/m1) | (nM) |
| 31-1 | 5.7 | VHH hShuffle | 0.29 | 12 |
| 31-6 | 9.6 | VHH hShuffle | 0.29 | 14 |
| 31-26 | 5.1 | VHH hShuffle | 0.31 | 19 |
| 30-30 | 8.0 | VHH Shuffle | 0.11 | 23 |
| 31-32 | 8.0 | VHH hShuffle | 0.25 | 27 |
| 29-10 | 5.0 | VHH Ratio | 0.19 | 32 |
| 29-7 | 7.3 | VHH Ratio | 0.28 | 41 |
| 30-43 | 13.5 | VHH Shuffle | 0.18 | 44 |
| 31-8 | 12.7 | VHH hShuffle | 0.29 | 45 |
| 31-56 | 11.7 | VHH hShuffle | 0.26 | 46 |
| 30-52 | 4.2 | VHH Shuffle | 0.22 | 49 |
| 31-47 | 8.8 | VHH hShuffle | 0.23 | 53 |
| 30-15 | 9.3 | VHH Shuffle | 0.26 | 55 |
| 30-54 | 5.5 | VHH Shuffle | 0.30 | 58 |
| 30-49 | 10.3 | VHH Shuffle | 0.26 | 62 |
| 29-22 | 3.4 | VHH Ratio | 0.27 | 65 |
| 29-30 | 9.2 | VHH Ratio | 0.28 | 65 |
| 31-35 | 5.7 | VHH hShuffle | 0.24 | 66 |
| 29-1 | 10.4 | VHH Ratio | 0.09 | 68 |
| 29-6 | 6.8 | VHH Ratio | 0.29 | 69 |
| 31-34 | 6.0 | VHH hShuffle | 0.32 | 70 |
| 29-12 | 6.2 | VHH Ratio | 0.23 | 70 |
| 30-1 | 5.4 | VHH Shuffle | 0.39 | 71 |
| 29-33 | 3.9 | VHH Ratio | 0.15 | 74 |
| 30-20 | 4.6 | VHH Shuffle | 0.19 | 74 |
| 31-20 | 6.6 | VHH hShuffle | 0.37 | 74 |
| 31-24 | 3.1 | VHH hShuffle | 0.15 | 75 |
| 30-14 | 9.9 | VHH Shuffle | 0.19 | 75 |
| 30-53 | 7.6 | VHH Shuffle | 0.24 | 78 |
| 31-39 | 9.9 | VHH hShuffle | 0.32 | 78 |
| 29-18 | 10.9 | VHH Ratio | 0.19 | 78 |
| 30-9 | 8.0 | VHH Shuffle | 0.40 | 79 |
| 29-34 | 8.6 | VHH Ratio | 0.21 | 80 |
| −29-27 | 8.6 | VHH Ratio | 0.18 | 82 |
| 29-20 | 5.9 | VHH Ratio | 0.26 | 83 |
| 30-55 | 6.0 | VHH Shuffle | 0.41 | 85 |
| 30-39 | 6.1 | VHH Shuffle | 0.07 | 88 |
| 31-15 | 6.2 | VHH hShuffle | 0.32 | 88 |
| 29-21 | 4.3 | VHH Ratio | 0.23 | 88 |
| 29-37 | 5.3 | VHH Ratio | 0.26 | 89 |
| 29-40 | 6.6 | VHH Ratio | 0.31 | 90 |
| 31-30 | 3.2 | VHH hShuffle | 0.33 | 93 |
| 31-10 | 12.3 | VHH hShuffle | 0.31 | 94 |
| 29-3 | 13.6 | VHH Ratio | 0.11 | 94 |
| 30-57 | 5.2 | VHH Shuffle | 0.24 | 95 |
| 29-31 | 4.4 | VHH Ratio | 0.18 | 96 |
| 31-27 | 8.1 | VHH hShuffle | 0.31 | 96 |
| 31-33 | 6.0 | VHH hShuffle | 0.32 | 96 |
| 30-40 | 7.1 | VHH Shuffle | 0.21 | 99 |
| 31-18 | 4.1 | VHH hShuffle | 0.36 | 99 |
| 30-5 | 9.3 | VHH Shuffle | 0.05 | 100 |

TABLE 5B
TIGIT unique clones and TIGIT binders

| Library | Unique Phage | VHH-Fc binders |
|---|---|---|
| VHH Ratio | 47 | 36 |
| VHH Shuffle | 58 | 45 |
| VHH hShuffle | 56 | 53 |

[0158] Thermostability and competition analysis of the VHH-Fc TIGIT clones is seen in FIG. 9 and Table 6. For the competition assays, 4 μg/mL TIGIT was immobilized and incubated with 0.05-100 nM VHH-Fc followed by incubation with 2 μg/mL biotin-CD155 and 1:5000 streptavidin-HRP.

TABLE 6
Thermostability of VHH-Fc TIGIT clones

| Variant | Library | K_{D} (nM) | Tₘ₁ | Tₘ₂ | IC50 (nM) |
|---|---|---|---|---|---|
| TIGIT-29-10 | Ratio | 32 | 72 | 87 | 17.65 |
| TIGIT-29-7 | Ratio | 41 | 82 | 90 | 9.24 |
| TIGIT-30-30 | Shuffle | 23 | 76 | 87 | 5.67 |
| TIGIT-30-43 | Shuffle | 44 | 82 | 90 | 2.32 |
| TIGIT-31-1 | hShuffle | 12 | 79 | 89 | 17.89 |
| TIGIT-31-6 | hShuffle | 14 | 77 | 87 | 4.00 |
| TIGIT-31-26 | hShuffle | 19 | 79 | 89 | 8.20 |
| TIGIT-31-32 | hShuffle | 27 | 80 | 86 | 2.85 |
| TIGIT-31-8 | hShuffle | 45 | 76 | 84 | 3.92 |
| TIGIT-31-56 | hShuffle | 46 | 74 | 83 | 1.52 |

### Example 5. Hyperimmune Immunoglobulin Library

[0159] A hyperimmune immunoglobulin (IgG) library was created using similar methods as described in Example 4. Briefly, the hyperimmune IgG library was generated from analysis of databases of human naïve and memory B-cell receptor sequences consisting of more than 37 million unique IgH sequences from each of 3 healthy donors. More than two million CDRH3 sequences were gathered from the analysis and individually constructed using methods similar to Examples 1-3. Any duplicate CDRH3's and potential liability motifs that frequently pose problems in development were removed during the library synthesis step including unpaired C- and N-glycosylation, deamination, and hydrolysis sites. These CDRH3 sequence diversities were then combinatorially assembled and incorporated onto the DP47 human framework to construct a highly functional antibody Fab library with 1×10¹⁰ size. A schematic of the design can be seen in FIG. 10.

[0160] The heavy chain CDR length distribution of the hyperimmune antibody libraries were assessed by next generation sequencing (NGS). The data of CDR length distribution is shown in FIGS. 11A-11B. Generally, selection of soluble protein targets undergo five rounds of selection involving a PBST wash three times in Round 1, a PBST wash five times in Round 2, a PBST wash seven times in Round 3, a PBST wash nine times in Round 4, and a PBST wash twelve times in Round 5. A non-fat milk block was used. See FIG. 12, FIG. 15A-15C, and FIG. 16A-16G.

[0161] For human TIGIT (hTIGIT), 1 uM biotinylated antigen was mixed with 300 ul Dynabead M-280 at 10 mg/mL to generate a concentration of 100 pmol per 100 ul. The details of the various rounds of selection are seen in Table 7.

TABLE 7
Protein panning selection

| | | | |
|---|---|---|---|
| Round | Washes | Antigen Amount | Concentration |

Manual

| | | | | | |
|---|---|---|---|---|---|
| 1 | 3 | 100 | pmol | 1 | uM |
| 2 | 6 | 20 | pmol | 200 | nM |
| 3 | 9 | 10 | pmol | 100 | nM |
| 4 | 12 | 5 | pmol | 50 | nM |
| 5 | 12 | 5 | pmol | 50 | nM |

Kingfisher (KF)

| | | | | | |
|---|---|---|---|---|---|
| 1 | 2 | 100 | pmol | 1 | uM |
| 2 | 4 | 20 | pmol | 200 | nM |
| 3 | 6 | 10 | pmol | 100 | nM |
| 4 | 8 | 5 | pmol | 50 | nM |
| 5 | 8 | 5 | pmol | 50 | nM |

[0162] After various rounds of selection, hTIGIT IgGs were analyzed. Data is seen in FIGS. 13A-13F and Table 8. FIGS. 13A-13D show ELISA data from Round 3 and Round 4. FIGS. 13E-13F show data of CDRH3 length, yield (ug), and K_{D} (nM) for the hTIGIT IgGs analyzed.

TABLE 8
Protein panning data

| | | | | KF | | KF |
|---|---|---|---|---|---|---|
| Round | Target | Antigen | Washes | Washes | Titer | liter |
| 1 | hTIGIT | 100 pmol | 3 | — | 4.40E+06 | — |
| 2 | hTIGIT | 50 pmol | 5 | 4 | 4.40E+07 | 6.80E+06 |
| 3 | hTIGIT | 20 pmol | 7 | 4 | 6.00E+08 | 2.80E+09 |
| 4 | hTIGIT | 10 pmol | 9 | 5 | 5.00E+08 | 6.00E+08 |
| 5 | hTIGIT | 10 pmol | — | — | — | — |

[0163] Seventeen non-identical hTIGIT immunoglobulins were identified with monovalent affinity ranging from 16 nM to over 300 nM. Most of these immunoglobulins expressed well and produced over 20 ug purified protein at 1 ml expression volume.

### Example 6. Natural Antibody Library

[0164] An antibody library of TIGIT variant immunoglobulins was generated and assessed for pharmacokinetic characteristics.

[0165] Data is seen in Tables 9A-9B3 from the Carterra SPR system used to assess binding affinity and affinity distribution for the TIGIT variant immunoglobulins. Flow cytometry data for the TIGIT variant immunoglobulins can be found in FIG. 14A-AA.

TABLE 9A

| | | VHH-Fc | | | | | | | | | | TIGIT: |
|---|---|---|---|---|---|---|---|---|---|---|---|---|
| | | IgG | ka | | | VHH-V5-His | | | | | | CD155 |
| | | yield | (M−1 | kd | K_{D} | ProA | | VHH-V5-His SPR (8-22-19) | | | | Blockade |
| Variant | ELISA | (mg/ml) | s−1) | (s−1) | (nM) | (mg/ml) | Tm | ka | kd | kD | RU | IC50 (nM) |
| TIGIT- | 10.4 | 0.09 | 1.0E+09 | 6.8E+01 | 68 | 0.74 | 55.9 | 3E+04 | 1E−02 | 365 | 88 | |
| 29-01 | | | | | | | | | | | | |
| TIGIT- | 4.1 | 0.24 | 4.2E+07 | 8.5E+00 | 204 | 0.36 | 57.9 | | | | | |
| 29-02 | | | | | | | | | | | | |
| TIGIT- | 13.6 | 0.11 | 1.2E+06 | 1.1E−01 | 94 | 0.77 | 63.3 | | | | | |
| 29-03 | | | | | | | | | | | | |
| TIGIT- | 7.7 | 0.21 | 1.9E+08 | 2.0E+01 | 109 | | | | | | | |
| 29-4 | | | | | | | | | | | | |
| TIGIT- | 3.1 | 0.10 | 2.0E+05 | 3.4E−01 | 1681 | | | | | | | |
| 29-5 | | | | | | | | | | | | |
| TIGIT- | 6.8 | 0.29 | 9.9E+04 | 6.8E−03 | 69 | 0.56 | 73.1 | 5E+01 | 2E−02 | 432954 | 26131 | |
| 29-06 | | | | | | | | | | | | |
| TIGIT- | 7.3 | 0.28 | 1.1E+05 | 4.7E−03 | 41 | 0.41 | 55.7 | 8E+03 | 4E−03 | 465 | 26 | 9.2 |
| 29-07 | | | | | | | | | | | | |
| TIGIT- | 3.1 | 0.19 | 1.8E+05 | 2.7E−01 | 1458 | | | | | | | |
| 29-8 | | | | | | | | | | | | |
| TIGIT- | 6.0 | 0.19 | 1.0E+09 | 1.8E+02 | 176 | | | | | | | |
| 29-9 | | | | | | | | | | | | |
| TIGIT- | 5.0 | 0.19 | 1.5E+05 | 4.9E−03 | 32 | 0.74 | 55.9 | 1E+04 | 3E−03 | 323 | 36 | 17.7 |
| 29-10 | | | | | | | | | | | | |
| TIGIT- | 10.4 | 0.20 | 4.3E+08 | 4.4E+01 | 103 | | | | | | | |
| 29-11 | | | | | | | | | | | | |
| TIGIT- | 6.2 | 0.23 | 1.0E+09 | 7.0E+01 | 70 | 0.49 | 55.8 | 1E+04 | 1E−01 | 8579 | 464 | |
| 29-12 | | | | | | | | | | | | |
| TIGIT- | 4.8 | 0.14 | 1.0E+09 | 2.2E+02 | 221 | | | | | | | |
| 29-13 | | | | | | | | | | | | |
| TIGIT- | 5.2 | 0.15 | 2.5E+05 | 5.7E−02 | 231 | | | | | | | |
| 29-14 | | | | | | | | | | | | |
| TIGIT- | 9.3 | 0.20 | 1.0E+09 | 1.5E+02 | 145 | | | | | | | |
| 29-15 | | | | | | | | | | | | |
| TIGIT- | 4.2 | 0.32 | 2.1E+08 | 5.3E+01 | 246 | | | | | | | |
| 29-16 | | | | | | | | | | | | |
| TIGIT- | 3.2 | 0.21 | | | | | | | | | | |
| 29-17 | | | | | | | | | | | | |
| TIGIT- | 10.9 | 0.19 | 6.4E+05 | 5.0E−02 | 78 | 0.90 | 69.0 | 2E+04 | 7E−03 | 352 | 157 | |
| 29-18 | | | | | | | | | | | | |
| TIGIT- | 9.0 | 0.20 | | | | | | | | | | |
| 29-19 | | | | | | | | | | | | |
| TIGIT- | 5.9 | 0.26 | 1.0E+09 | 8.3E+01 | 83 | | | | | | | |
| 29-20 | | | | | | | | | | | | |
| TIGIT- | 4.3 | 0.23 | 2.8E+04 | 2.4E−03 | 88 | | | | | | | |
| 29-21 | | | | | | | | | | | | |
| TIGIT- | 3.4 | 0.27 | 2.9E+05 | 1.9E−02 | 65 | 0.36 | 57.9 | 6E+03 | 3E−03 | 500 | 123 | |
| 29-22 | | | | | | | | | | | | |
| TIGIT- | 4.7 | 0.29 | 8.9E+08 | 6.7E+02 | 759 | | | | | | | |
| 29-23 | | | | | | | | | | | | |
| TIGIT- | 3.2 | 0.28 | 5.0E+05 | 4.1E−01 | 822 | | | | | | | |
| 29-24 | | | | | | | | | | | | |
| TIGIT- | 6.3 | 0.14 | 3.0E+08 | 4.2E+01 | 138 | | | | | | | |
| 29-25 | | | | | | | | | | | | |
| TIGIT- | 11.4 | 0.14 | 8.2E+08 | 8.7E+01 | 105 | | | | | | | |
| 29-26 | | | | | | | | | | | | |
| TIGIT- | 8.6 | 0.18 | 1.3E+05 | 1.1E−02 | 82 | | | | | | | |
| 29-27 | | | | | | | | | | | | |
| TIGIT- | 3.6 | 0.24 | 2.7E+08 | 9.4E+01 | 352 | | | | | | | |
| 29-28 | | | | | | | | | | | | |
| TIGIT- | 11.1 | 0.24 | 1.0E+09 | 1.1E+02 | 108 | | | | | | | |
| 29-29 | | | | | | | | | | | | |
| TIGIT- | 9.2 | 0.28 | 1.5E+06 | 9.6E−02 | 65 | 0.77 | 63.3 | 3E+05 | 8E−02 | 232 | 77 | |
| 29-30 | | | | | | | | | | | | |
| TIGIT- | 4.4 | 0.18 | 9.5E+04 | 9.0E−03 | 96 | | | | | | | |
| 29-31 | | | | | | | | | | | | |
| TIGIT- | 3.7 | 0.32 | | | | | | | | | | |
| 29-32 | | | | | | | | | | | | |
| TIGIT- | 3.9 | 0.15 | 1.0E+09 | 7.4E+01 | 74 | 0.47 | 55.3 | 2E+04 | 4E−02 | 1519 | 202 | |
| 29-33 | | | | | | | | | | | | |
| TIGIT- | 8.6 | 0.21 | 1.6E+08 | 1.3E+01 | 80 | 0.74 | 67.0 | 3E+04 | 3E−02 | 967 | 167 | |
| 29-34 | | | | | | | | | | | | |
| TIGIT- | 3.1 | 0.17 | 4.9E+02 | 2.0E−02 | | | | | | | | |
| 29-35 | | | | | | | | | | | | |
| TIGIT- | 3.5 | 0.19 | 8.6E+08 | 1.4E+02 | 165 | | | | | | | |
| 29-36 | | | | | | | | | | | | |
| TIGIT- | 5.3 | 0.26 | 1.0E+09 | 8.9E+01 | 89 | | | | | | | |
| 29-37 | | | | | | | | | | | | |
| TIGIT- | 3.4 | 0.22 | | | | | | | | | | |
| 29-38 | | | | | | | | | | | | |
| TIGIT- | 3.4 | 0.26 | 2.0E+08 | 6.4E+01 | 314 | | | | | | | |
| 29-39 | | | | | | | | | | | | |
| TIGIT- | 6.6 | 0.31 | 7.6E+08 | 6.9E+01 | 90 | | | | | | | |
| 29-40 | | | | | | | | | | | | |
| TIGIT- | 7.7 | 0.13 | | | | | | | | | | |
| 29-41 | | | | | | | | | | | | |
| TIGIT- | 10.0 | 0.11 | 5.8E+08 | 6.6E+01 | 114 | | | | | | | |
| 29-42 | | | | | | | | | | | | |
| TIGIT- | 4.8 | 0.18 | | | | | | | | | | |
| 29-43 | | | | | | | | | | | | |
| TIGIT- | 7.4 | 0.16 | 7.3E+08 | 1.3E+02 | 183 | | | | | | | |
| 29-44 | | | | | | | | | | | | |
| TIGIT- | 10.6 | 0.09 | 5.7E+05 | 6.8E−02 | 119 | | | | | | | |
| 29-45 | | | | | | | | | | | | |
| TIGIT- | 7.4 | 0.26 | 9.4E+05 | 2.3E−01 | 250 | | | | | | | |
| 29-46 | | | | | | | | | | | | |
| TIGIT- | 4.9 | 0.28 | 5.2E+07 | 1.6E+01 | 304 | | | | | | | |
| 29-47 | | | | | | | | | | | | |
| TIGIT- | 5.4 | 0.39 | 1.4E+06 | 1.0E−01 | 71 | 0.63 | 54.5 | 1E+04 | 8E−02 | 7464 | 664 | |
| 30-01 | | | | | | | | | | | | |
| TIGIT- | 6.4 | 0.19 | 1.8E+08 | 8.9E+01 | 496 | 0.52 | 68.9 | | | | | |
| 30-02 | | | | | | | | | | | | |
| TIGIT- | 4.3 | 0.08 | 1.0E+09 | 2.7E+02 | 273 | 0.04 | 60.0 | | | | | |
| 30-03 | | | | | | | | | | | | |
| TIGIT- | 4.7 | 0.17 | 6.2E+08 | 1.5E+02 | 240 | 0.69 | 57.1 | | | | | |
| 30-04 | | | | | | | | | | | | |
| TIGIT- | 9.3 | 0.0 | 1.0E+09 | 1.0E+02 | 100 | 0.49 | 65.6 | | | | | |
| 30-5 | | | | | | | | | | | | |
| TIGIT- | 3.8 | 0.16 | 1.5E+04 | 8.7E−03 | 567 | | | | | | | |
| 30-6 | | | | | | | | | | | | |
| TIGIT- | 3.1 | 0.20 | 3.5E+05 | 9.9E−02 | 285 | | | | | | | |
| 30-7 | | | | | | | | | | | | |
| TIGIT- | 6.2 | 0.31 | 3.3E+05 | 6.9E−02 | 209 | | | | | | | |
| 30-8 | | | | | | | | | | | | |
| TIGIT- | 8.0 | 0.40 | 1.3E+05 | 1.1E−02 | 79 | | | | | | | |
| 30-9 | | | | | | | | | | | | |
| TIGIT- | 4.2 | 0.10 | 1.2E+05 | 3.9E−02 | 336 | | | | | | | |
| 30-10 | | | | | | | | | | | | |
| TIGIT- | 7.2 | 0.11 | 2.5E+05 | 5.6E−02 | 221 | | | | | | | |
| 30-11 | | | | | | | | | | | | |
| TIGIT- | 3.8 | 0.03 | 1.6E+07 | 5.7E+00 | 350 | | | | | | | |
| 30-12 | | | | | | | | | | | | |
| TIGIT- | 3.2 | 0.28 | 7.7E+08 | 8.2E+01 | 106 | | | | | | | |
| 30-13 | | | | | | | | | | | | |
| TIGIT- | 9.9 | 0.19 | 1.4E+05 | 1.0E−02 | 75 | | | | | | | |
| 30-14 | | | | | | | | | | | | |
| TIGIT- | 9.3 | 0.26 | 1.3E+05 | 7.0E−03 | 55 | 0.63 | 54.5 | 2E+04 | 4E−03 | 215 | 66 | |
| 30-15 | | | | | | | | | | | | |
| TIGIT- | 7.9 | 0.21 | 4.8E+05 | 5.6E−02 | 116 | | | | | | | |
| 30-16 | | | | | | | | | | | | |
| TIGIT- | 6.7 | 0.30 | 4.3E+08 | 1.3E+02 | 311 | | | | | | | |
| 30-17 | | | | | | | | | | | | |
| TIGIT- | 4.1 | 0.06 | 9.2E+04 | 6.8E−02 | 741 | | | | | | | |
| 30-18 | | | | | | | | | | | | |
| TIGIT- | 6.4 | 0.18 | 1.9E+08 | 7.9E+01 | 417 | | | | | | | |
| 30-19 | | | | | | | | | | | | |
| TIGIT- | 4.6 | 0.19 | 1.9E+06 | 1.4E−01 | 74 | 0.52 | 68.9 | 1E+04 | 2E−03 | 195 | 69 | |
| 30-20 | | | | | | | | | | | | |
| TIGIT- | 3.3 | 0.14 | 3.3E+07 | 1.3E+01 | 413 | | | | | | | |
| 30-21 | | | | | | | | | | | | |
| TIGIT- | 7.6 | 0.20 | 4.5E+04 | 3.7E−02 | 811 | | | | | | | |
| 30-22 | | | | | | | | | | | | |
| TIGIT- | 4.1 | 0.36 | 4.4E+02 | 2.9E−01 | | | | | | | | |
| 30-23 | | | | | | | | | | | | |
| TIGIT- | 5.3 | 0.26 | 5.7E+08 | 7.6E+01 | 133 | | | | | | | |
| 30-24 | | | | | | | | | | | | |
| TIGIT- | 9.3 | 0.05 | 3.4E+04 | 4.0E−03 | 117 | | | | | | | |
| 30-25 | | | | | | | | | | | | |
| TIGIT- | 6.1 | 0.22 | 2.8E+04 | 9.9E−03 | 347 | | | | | | | |
| 30-26 | | | | | | | | | | | | |
| TIGIT- | 4.4 | 0.24 | 7.6E+05 | 1.1E−01 | 141 | | | | | | | |
| 30-27 | | | | | | | | | | | | |
| TIGIT- | 7.6 | 0.24 | 8.9E+08 | 1.3E+02 | 147 | | | | | | | |
| 30-28 | | | | | | | | | | | | |
| TIGIT- | 4.3 | 0.11 | 4.9E+05 | 7.3E−02 | 148 | | | | | | | |
| 30-29 | | | | | | | | | | | | |
| TIGIT- | 8.0 | 0.11 | 3.5E+05 | 8.0E−03 | 23 | 0.04 | 60.0 | 1E+04 | 6E−03 | 387 | 3 | 5.7 |
| 30-30 | | | | | | | | | | | | |
| TIGIT- | 3.8 | 0.28 | 1.0E+09 | 4.5E+02 | 450 | | | | | | | |
| 30-31 | | | | | | | | | | | | |
| TIGIT- | 6.0 | 0.23 | 2.9E+05 | 6.0E−02 | 207 | | | | | | | |
| 30-32 | | | | | | | | | | | | |
| TIGIT- | 3.8 | 0.30 | 1.2E+05 | 1.8E−01 | 1546 | | | | | | | |
| 30-33 | | | | | | | | | | | | |
| TIGIT- | 7.2 | 0.16 | 4.9E+08 | 6.4E+01 | 130 | | | | | | | |
| 30-34 | | | | | | | | | | | | |
| TIGIT- | 3.3 | #N/A | | | | | | | | | | |
| 30-35 | | | | | | | | | | | | |
| TIGIT- | 6.4 | 0.09 | 6.6E+05 | 1.2E−01 | 179 | | | | | | | |
| 30-36 | | | | | | | | | | | | |
| TIGIT- | 4.2 | 0.07 | 1.7E+05 | 4.1E−02 | 235 | | | | | | | |
| 30-37 | | | | | | | | | | | | |
| TIGIT- | 3.9 | 0.13 | 2.6E+08 | 9.2E+01 | 360 | | | | | | | |
| 30-38 | | | | | | | | | | | | |
| TIGIT- | 6.1 | 0.07 | 8.1E+04 | 7.1E−03 | 88 | | | | | | | |
| 30-39 | | | | | | | | | | | | |
| TIGIT- | 7.1 | 0.21 | 9.7E+04 | 9.6E−03 | 99 | 1.00 | 55.6 | 3E+04 | 6E−03 | 222 | 113 | |
| 30-40 | | | | | | | | | | | | |
| TIGIT- | 8.7 | 0.25 | 2.4E+08 | 7.4E+01 | 309 | | | | | | | |
| 30-41 | | | | | | | | | | | | |
| TIGIT- | 6.3 | 0.26 | | | | | | | | | | |
| 30-42 | | | | | | | | | | | | |
| TIGIT- | 13.5 | 0.18 | 2.9E+05 | 1.3E−02 | 44 | 0.69 | 57.1 | 7E+04 | 8E−03 | 107 | 407 | 2.3 |
| 30-43 | | | | | | | | | | | | |
| TIGIT- | 3.5 | 0.28 | 6.1E+08 | 3.6E+02 | 584 | | | | | | | |
| 30-44 | | | | | | | | | | | | |
| TIGIT- | 3.3 | 0.20 | 2.1E+06 | 1.5E+00 | 736 | | | | | | | |
| 30-45 | | | | | | | | | | | | |
| TIGIT- | 5.9 | 0.22 | 5.8E+08 | 1.2E+02 | 206 | | | | | | | |
| 30-46 | | | | | | | | | | | | |
| TIGIT- | 8.4 | 0.20 | 4.4E+04 | 1.9E−02 | 418 | | | | | | | |
| 30-47 | | | | | | | | | | | | |
| TIGIT- | 3.6 | 0.27 | | | | | | | | | | |
| 30-48 | | | | | | | | | | | | |
| TIGIT- | 10.3 | 0.26 | 3.0E+08 | 1.8E+01 | 62 | 0.49 | 72.5 | 9E+04 | 8E−02 | 945 | 99 | |
| 30-49 | | | | | | | | | | | | |
| TIGIT- | 5.6 | 0.25 | | | | | | | | | | |
| 30-50 | | | | | | | | | | | | |
| TIGIT- | 3.4 | 0.06 | 9.9E+08 | 8.9E+02 | 897 | | | | | | | |
| 30-51 | | | | | | | | | | | | |
| TIGIT- | 4.2 | 0.22 | 5.4E+06 | 2.7E−01 | 49 | 0.49 | 65.6 | 3E+04 | 1E−01 | 4245 | 270 | n.d. |
| 30-52 | | | | | | | | | | | | |
| TIGIT- | 7.6 | 0.24 | 5.3E+08 | 4.1E+01 | 78 | | | | | | | |
| 30-53 | | | | | | | | | | | | |
| TIGIT- | 5.5 | 0.30 | 2.4E+05 | 1.4E−02 | 58 | 0.60 | 71.7 | 3E+04 | 4E−02 | 1090 | 130 | |
| 30-54 | | | | | | | | | | | | |
| TIGIT- | 6.0 | 0.41 | 3.5E+04 | 3.0E−03 | 85 | | | | | | | |
| 30-55 | | | | | | | | | | | | |
| TIGIT- | 4.6 | 0.40 | 7.5E+08 | 1.6E+02 | 214 | | | | | | | |
| 30-56 | | | | | | | | | | | | |
| TIGIT- | 5.2 | 0.24 | 1.0E+09 | 9.5E+01 | 95 | | | | | | | |
| 30-57 | | | | | | | | | | | | |
| TIGIT- | 3.3 | 0.30 | 1.7E+07 | 1.8E+01 | 1051 | 1.04 | 55.8 | 1E+04 | 1E−02 | 1059 | 120 | |
| 30-58 | | | | | | | | | | | | |
| TIGIT- | 5.7 | 0.29 | 2.8E+05 | 3.5E−03 | 12 | 0.68 | 55.7 | 2E+04 | 4E−03 | 169 | 122 | 17.8 |
| 31-01 | | | | | | | | | | | | |
| TIGIT- | 8.4 | 0.40 | 2.5E+05 | 5.4E−02 | 216 | 0.73 | 61.2 | | | | | |
| 31-02 | | | | | | | | | | | | |
| TIGIT- | 9.5 | 0.34 | 2.6E+05 | 3.0E−02 | 116 | 0.95 | 56.0 | | | | | |
| 31-03 | | | | | | | | | | | | |
| TIGIT- | 3.2 | 0.36 | | | | 0.89 | 49.7 | | | | | |
| 31-04 | | | | | | | | | | | | |
| TIGIT- | 3.8 | 0.28 | | | | 0.40 | 63.5 | | | | | |
| 31-05 | | | | | | | | | | | | |
| TIGIT- | 9.6 | 0.29 | 2.4E+05 | 3.5E−03 | 14 | 0.76 | 62.9 | 2E+04 | 3E−03 | 145 | 107 | 4.0 |
| 31-06 | | | | | | | | | | | | |
| TIGIT- | 7.9 | 0.40 | 9.1E+04 | 2.5E−02 | 275 | | | | | | | |
| 31-7 | | | | | | | | | | | | |
| TIGIT- | 12.7 | 0.29 | 3.8E+05 | 1.7E−02 | 45 | 0.74 | 52.6 | 4E+04 | 9E−03 | 210 | 178 | 3.9 |
| 31-08 | | | | | | | | | | | | |
| TIGIT- | 9.7 | 0.26 | 1.9E+05 | 2.4E−02 | 131 | | | | | | | |
| 31-9 | | | | | | | | | | | | |
| TIGIT- | 12.3 | 0.31 | 1.3E+06 | 1.2E−01 | 94 | | | | | | | |
| 31-10 | | | | | | | | | | | | |
| TIGIT- | 4.5 | 0.34 | 3.6E+05 | 4.2E−02 | 118 | | | | | | | |
| 31-11 | | | | | | | | | | | | |
| TIGIT- | 5.3 | 0.16 | | | | | | | | | | |
| 31-12 | | | | | | | | | | | | |
| TIGIT- | 7.3 | 0.33 | 8.0E+04 | 3.3E−02 | 409 | | | | | | | |
| 31-13 | | | | | | | | | | | | |
| TIGIT- | 5.8 | 0.26 | 1.0E+05 | 1.1E−02 | 114 | | | | | | | |
| 31-14 | | | | | | | | | | | | |
| TIGIT- | 6.2 | 0.32 | 2.2E+07 | 2.0E+00 | 88 | | | | | | | |
| 31-15 | | | | | | | | | | | | |
| TIGIT- | 9.2 | 0.22 | 2.4E+05 | 3.7E−02 | 151 | | | | | | | |
| 31-16 | | | | | | | | | | | | |
| TIGIT- | 8.7 | 0.26 | 1.5E+05 | 2.5E−02 | 166 | | | | | | | |
| 31-17 | | | | | | | | | | | | |
| TIGIT- | 4.1 | 0.36 | 5.4E+06 | 5.4E−01 | 99 | | | | | | | |
| 31-18 | | | | | | | | | | | | |
| TIGIT- | 6.7 | 0.23 | 1.0E+09 | 1.3E+02 | 125 | | | | | | | |
| 31-19 | | | | | | | | | | | | |
| TIGIT- | 6.6 | 0.37 | 1.2E+05 | 9.2E−03 | 74 | 1.18 | 67.0 | 1E+04 | 4E−03 | 281 | 45 | |
| 31-20 | | | | | | | | | | | | |
| TIGIT- | 9.4 | 0.46 | 1.6E+05 | 2.0E−02 | 122 | | | | | | | |
| 31-21 | | | | | | | | | | | | |
| TIGIT- | 7.4 | 0.56 | 6.1E+01 | 2.8E−04 | 4617 | | | | | | | |
| 31-22 | | | | | | | | | | | | |
| TIGIT- | 6.6 | 0.30 | 3.8E+05 | 4.9E−02 | 127 | | | | | | | |
| 31-23 | | | | | | | | | | | | |
| TIGIT- | 3.1 | 0.15 | 8.8E+05 | 6.6E−02 | 75 | | | | | | | |
| 31-24 | | | | | | | | | | | | |
| TIGIT- | 6.2 | 0.31 | 5.6E+08 | 8.6E+01 | 154 | | | | | | | |
| 31-25 | | | | | | | | | | | | |
| TIGIT- | 5.1 | 0.31 | 1.9E+05 | 3.6E−03 | 19 | 0.73 | 61.2 | 2E+04 | 3E−03 | 158 | 59 | 8.2 |
| 31-26 | | | | | | | | | | | | |
| TIGIT- | 8.1 | 0.31 | 1.0E+09 | 9.6E+01 | 96 | | | | | | | |
| 31-27 | | | | | | | | | | | | |
| TIGIT- | 3.7 | 0.22 | 4.4E+05 | 1.0E−01 | 234 | | | | | | | |
| 31-28 | | | | | | | | | | | | |
| TIGIT- | 7.4 | 0.44 | 3.2E+02 | 5.4E−04 | 1685 | | | | | | | |
| 31-29 | | | | | | | | | | | | |
| TIGIT- | 3.2 | 0.33 | 1.0E+09 | 9.3E+01 | 93 | | | | | | | |
| 31-30 | | | | | | | | | | | | |
| TIGIT- | 6.7 | 0.30 | 5.2E+05 | 5.4E−02 | 104 | | | | | | | |
| 31-31 | | | | | | | | | | | | |
| TIGIT- | 8.0 | 0.25 | 5.6E+05 | 1.5E−02 | 27 | 0.95 | 56.0 | 6E+04 | 6E−03 | 102 | 145 | 2.9 |
| 31-32 | | | | | | | | | | | | |
| TIGIT- | 6.0 | 0.32 | 5.3E+05 | 5.1E−02 | 96 | | | | | | | |
| 31-33 | | | | | | | | | | | | |
| TIGIT- | 6.0 | 0.32 | 5.5E+04 | 3.9E−03 | 70 | 0.35 | 63.0 | 4E+02 | 2E−01 | 473248 | 25265 | |
| 31-34 | | | | | | | | | | | | |
| TIGIT- | 5.7 | 0.24 | 4.8E+05 | 3.2E−02 | 66 | 1.07 | 60.9 | 3E+04 | 1E−02 | 346 | 78 | |
| 31-35 | | | | | | | | | | | | |
| TIGIT- | 5.6 | 0.30 | 4.1E+05 | 4.1E−02 | 102 | | | | | | | |
| 31-36 | | | | | | | | | | | | |
| TIGIT- | 5.7 | 0.41 | | | | | | | | | | |
| 31-37 | | | | | | | | | | | | |
| TIGIT- | 4.8 | 0.25 | 3.6E+05 | 6.2E−02 | 172 | | | | | | | |
| 31-38 | | | | | | | | | | | | |
| TIGIT- | 9.9 | 0.32 | 1.0E+05 | 8.2E−03 | 78 | | | | | | | |
| 31-39 | | | | | | | | | | | | |
| TIGIT- | 9.4 | 0.07 | | | | | | | | | | |
| 31-40 | | | | | | | | | | | | |
| TIGIT- | 5.8 | 0.23 | 1.3E+06 | 1.0E+00 | 750 | | | | | | | |
| 31-41 | | | | | | | | | | | | |
| TIGIT- | 9.6 | 0.29 | 6.5E+08 | 2.4E+02 | 371 | | | | | | | |
| 31-42 | | | | | | | | | | | | |
| TIGIT- | 4.9 | 0.17 | | | | | | | | | | |
| 31-43 | | | | | | | | | | | | |
| TIGIT- | 9.2 | 0.33 | 3.5E+05 | 4.9E−02 | 140 | | | | | | | |
| 31-44 | | | | | | | | | | | | |
| TIGIT- | 8.6 | 0.37 | 1.5E+05 | 3.0E−02 | 193 | | | | | | | |
| 31-45 | | | | | | | | | | | | |
| TIGIT- | 7.6 | 0.22 | 2.1E+05 | 2.7E−02 | 132 | | | | | | | |
| 31-46 | | | | | | | | | | | | |
| TIGIT- | 8.8 | 0.23 | 1.1E+05 | 5.9E−03 | 53 | 0.89 | 49.7 | 2E+04 | 4E−03 | 186 | 119 | n.d. |
| 31-47 | | | | | | | | | | | | |
| TIGIT- | 3.3 | 0.25 | 1.1E+08 | 1.9E+01 | 175 | | | | | | | |
| 31-48 | | | | | | | | | | | | |
| TIGIT- | 7.3 | 0.03 | | | | | | | | | | |
| 31-49 | | | | | | | | | | | | |
| TIGIT- | 6.7 | 0.27 | 6.6E+04 | 3.6E−02 | 551 | | | | | | | |
| 31-50 | | | | | | | | | | | | |
| TIGIT- | 12.1 | 0.26 | 8.5E+04 | 6.7E−02 | 784 | | | | | | | |
| 31-51 | | | | | | | | | | | | |
| TIGIT- | 6.5 | 0.24 | 8.4E+08 | 2.6E+02 | 308 | | | | | | | |
| 31-52 | | | | | | | | | | | | |
| TIGIT- | 3.2 | 0.43 | | | | | | | | | | |
| 31-53 | | | | | | | | | | | | |
| TIGIT- | 9.0 | 0.29 | 1.7E+05 | 1.8E−02 | 107 | | | | | | | |
| 31-54 | | | | | | | | | | | | |
| TIGIT- | 7.9 | 0.35 | 2.1E+05 | 3.3E−02 | 154 | | | | | | | |
| 31-55 | | | | | | | | | | | | |
| TIGIT- | 11.7 | 0.26 | 4.6E+05 | 2.1E−02 | 46 | 0.40 | 63.5 | 3E+04 | 1E−02 | 382 | 301 | 1.5 |
| 31-56 | | | | | | | | | | | | |
| TIGIT- | | | 3.59E+05 | 2.20E−02 | 6.13E−08 | | | | | | 175.3 | 9.6 |
| 471-001 | | | | | | | | | | | | |
| TIGIT- | | | | | | | | | | | | |
| 471-009 | | | | | | | | | | | | |
| TIGIT- | | | | | | | | | | | | |
| 471-017 | | | | | | | | | | | | |
| TIGIT- | | | | | | | | | | | | |
| 471-025 | | | | | | | | | | | | |
| TIGIT- | | | | | | | | | | | | |
| 471-033 | | | | | | | | | | | | |
| TIGIT- | | | | | | | | | | | | |
| 471-041 | | | | | | | | | | | | |
| TIGIT- | | | | | | | | | | | | |
| 471-049 | | | | | | | | | | | | |
| TIGIT- | | | | | | | | | | | | |
| 471-005 | | | | | | | | | | | | |
| TIGIT- | | | | | | | | | | | | |
| 471-013 | | | | | | | | | | | | |
| TIGIT- | | | | | | | | | | | | |
| 471-021 | | | | | | | | | | | | |
| TIGIT- | | | | | | | | | | | | |
| 471-029 | | | | | | | | | | | | |
| TIGIT- | | | | | | | | | | | | |
| 471-037 | | | | | | | | | | | | |
| TIGIT- | | | | | | | | | | | | |
| 471-045 | | | | | | | | | | | | |
| TIGIT- | | | | | | | | | | | | |
| 471-002 | | | | | | | | | | | | |
| TIGIT- | | | | | | | | | | | | |
| 471-010 | | | | | | | | | | | | |
| TIGIT- | | | | | | | | | | | | |
| 471-018 | | | | | | | | | | | | |
| TIGIT- | | | | | | | | | | | | |
| 471-026 | | | | | | | | | | | | |
| TIGIT- | | | | | | | | | | | | |
| 471-034 | | | | | | | | | | | | |
| TIGIT- | | | | | | | | | | | | |
| 471-042 | | | | | | | | | | | | |
| TIGIT- | | | | | | | | | | | | |
| 471-006 | | | | | | | | | | | | |
| TIGIT- | | | | | | | | | | | | |
| 471-014 | | | | | | | | | | | | |
| TIGIT- | | | | | | | | | | | | |
| 471-022 | | | | | | | | | | | | |
| TIGIT- | | | | | | | | | | | | |
| 471-030 | | | | | | | | | | | | |
| TIGIT- | | | 2.21E+05 | 1.22E−02 | 5.54E−08 | | | | | | 78.0 | 5.9 |
| 471-038 | | | | | | | | | | | | |
| TIGIT- | | | | | | | | | | | | |
| 471-046 | | | | | | | | | | | | |
| TIGIT- | | | | | | | | | | | | |
| 471-003 | | | | | | | | | | | | |
| TIGIT- | | | 3.69E+04 | 2.69E−01 | 7.29E−06 | | | | | | 1077.7 | 14.4 |
| 471-011 | | | | | | | | | | | | |
| TIGIT- | | | 3.44E+05 | 5.65E−02 | 1.64E−07 | | | | | | 155.9 | 13.6 |
| 471-019 | | | | | | | | | | | | |
| TIGIT- | | | 1.54E+05 | 9.26E−03 | 6.00E−08 | | | | | | 57.5 | 13.5 |
| 471-027 | | | | | | | | | | | | |
| TIGIT- | | | 1.23E+05 | 4.84E−02 | 3.95E−07 | | | | | | 93.7 | 3.2 |
| 471-035 | | | | | | | | | | | | |
| TIGIT- | | | | | | | | | | | | |
| 471-043 | | | | | | | | | | | | |
| TIGIT- | | | | | | | | | | | | |
| 471-007 | | | | | | | | | | | | |
| TIGIT- | | | | | | | | | | | | |
| 471-015 | | | | | | | | | | | | |
| TIGIT- | | | | | | | | | | | | |
| 471-023 | | | | | | | | | | | | |
| TIGIT- | | | | | | | | | | | | |
| 471-031 | | | | | | | | | | | | |
| TIGIT- | | | | | | | | | | | | |
| 471-039 | | | | | | | | | | | | |
| TIGIT- | | | | | | | | | | | | |
| 471-047 | | | | | | | | | | | | |
| TIGIT- | | | | | | | | | | | | |
| 471-004 | | | | | | | | | | | | |
| TIGIT- | | | | | | | | | | | | |
| 471-012 | | | | | | | | | | | | |
| TIGIT- | | | | | | | | | | | | |
| 471-020 | | | | | | | | | | | | |
| TIGIT- | | | 8.31+02 | 2.34E−01 | 2.82E−04 | | | | | | 35239.4 | 3.6 |
| 471-028 | | | | | | | | | | | | |
| TIGIT- | | | | | | | | | | | | |
| 471-036 | | | | | | | | | | | | |
| TIGIT- | | | | | | | | | | | | |
| 471-044 | | | | | | | | | | | | |
| TIGIT- | | | | | | | | | | | | |
| 471-008 | | | | | | | | | | | | |
| TIGIT- | | | | | | | | | | | | |
| 471-016 | | | | | | | | | | | | |
| TIGIT- | | | | | | | | | | | | |
| 471-024 | | | | | | | | | | | | |
| TIGIT- | | | | | | | | | | | | |
| 471-032 | | | | | | | | | | | | |
| TIGIT- | | | | | | | | | | | | |
| 471-040 | | | | | | | | | | | | |
| TIGIT- | | | 3.73E+05 | 1.92E−02 | 5.14E−08 | | | | | | 122.3 | 9.8 |
| 471-048 | | | | | | | | | | | | |

TABLE 9B

| | | SPR Kinetics | | |
|---|---|---|---|---|
| Variant | ELISA | ka (1/Ms) | kd (1/s) | KD (nM) |
| TIGIT-211-1 | 6.7 | | | |
| TIGIT-211-2 | 7.1 | | | |
| TIGIT-211-3 | 8.9 | | | |
| TIGIT-211-4 | 8.4 | | | |
| TIGIT-211-5 | 7.7 | | | |
| TIGIT-211-6 | 6.4 | | | |
| TIGIT-211-7 | 9.7 | | | |
| TIGIT-211-8 | 6.7 | | | |
| TIGIT-211-9 | 11.7 | | | |
| TIGIT-211-10 | 12.1 | | | |
| TIGIT-211-11 | 10.4 | | | |
| TIGIT-211-12 | 10.7 | | | |
| TIGIT-211-13 | 15.0 | 1.48E+06 | 3.26E−01 | 220.73 |
| TIGIT-211-14 | 6.9 | | | |
| TIGIT-211-15 | 11.3 | 2.36E+04 | 7.12E−03 | 301.49 |
| TIGIT-211-16 | 6.9 | | | |
| TIGIT-211-17 | 13.2 | 2.66E+05 | 1.26E−01 | 472.42 |
| TIGIT-211-18 | 9.7 | 3.11E+03 | 8.32E−04 | 267.70 |
| TIGIT-211-19 | 10.7 | | | |
| TIGIT-211-20 | 13.3 | | | |
| TIGIT-211-21 | 11.1 | | | |
| TIGIT-211-22 | 6.5 | | | |
| TIGIT-211-23 | 12.3 | | | |
| TIGIT-211-24 | 10.2 | | | |
| TIGIT-211-25 | 8.4 | | | |
| TIGIT-211-26 | 10.2 | | | |
| TIGIT-211-27 | 6.6 | | | |
| TIGIT-211-28 | 7.2 | 2.54E+04 | 1.60E−03 | 63.13 |
| TIGIT-211-29 | 6.8 | | | |
| TIGIT-211-30 | 8.0 | 3.05E+04 | 6.81E−02 | 2230.80 |
| TIGIT-211-31 | 7.0 | | | |
| TIGIT-211-32 | 8.6 | | | |
| TIGIT-211-33 | 7.1 | | | |
| TIGIT-211-34 | 8.2 | | | |
| TIGIT-211-35 | 8.8 | 6.71E+04 | 4.06E−02 | 605.31 |
| TIGIT-211-36 | 6.8 | | | |
| TIGIT-211-37 | 6.6 | | | |
| TIGIT-211-38 | 9.7 | | | |
| TIGIT-211-39 | 10.4 | | | |
| TIGIT-211-40 | 10.2 | 1.03E+05 | 4.05E−02 | 391.73 |
| TIGIT-211-41 | 9.6 | | | |
| TIGIT-211-42 | 8.0 | 9.74E+03 | 6.43E−04 | 66.06 |
| TIGIT-211-43 | 12.0 | 1.43E+03 | 1.17E−03 | 818.60 |
| TIGIT-211-44 | 8.4 | | | |
| TIGIT-211-45 | 8.8 | 1.19E+04 | 1.25E−03 | 104.78 |
| TIGIT-211-46 | 7.7 | | | |
| TIGIT-211-47 | 8.2 | | | |
| TIGIT-211-48 | 15.8 | | | |
| TIGIT-211-49 | 11.5 | | | |
| TIGIT-211-50 | 9.9 | | | |
| TIGIT-211-51 | 10.7 | 3.47E+05 | 3.35E−02 | 96.54 |
| TIGIT-211-52 | 8.6 | | | |
| TIGIT-211-53 | 6.8 | | | |
| TIGIT-211-54 | 8.7 | | | |
| TIGIT-211-55 | 7.9 | | | |
| TIGIT-211-56 | 10.6 | | | |
| TIGIT-211-57 | 12.4 | 3.08E+04 | 1.05E−01 | 3403.11 |
| TIGIT-211-58 | 7.2 | | | |
| TIGIT-211-59 | 6.8 | | | |
| TIGIT-211-60 | 9.7 | | | |
| TIGIT-211-61 | 11.7 | | | |
| TIGIT-211-62 | 8.8 | | | |
| TIGIT-211-63 | 7.9 | | | |
| TIGIT-211-64 | 9.1 | | | |
| TIGIT-211-65 | 9.0 | | | |
| TIGIT-211-66 | 7.8 | | | |
| TIGIT-211-67 | 6.8 | | | |
| TIGIT-211-68 | 10.1 | | | |
| TIGIT-211-69 | 7.9 | 2.04E+04 | 6.22E−02 | 3043.20 |
| TIGIT-211-77 | | 6.10E+04 | 4.17E−02 | 682.57 |
| TIGIT-211-93 | | 2.27E+04 | 2.81E−02 | 1240.31 |
| TIGIT-211-95 | | 2.13E+05 | 7.56E−02 | 354.74 |
| TIGIT-211-98 | | 1.71E+02 | 9.80E−02 | 574119.69 |
| TIGIT-211-116 | | 3.89E+02 | 1.05E−01 | 269379.61 |

### Example 7. Ribosomal Display Library

[0166] A VHH ribosome display library was designed based on a ribosome display template (GenBank AY327136.1). The VHH framework was engineered using humanized FW1, FW3, and FW4 sequences based on an analysis of conserved residues between human VH3-23, trastuzumab, and consensus llama VHHs. 1239 and 1570 sequences from llama HCDR1 and HCDR2, respectively, were incorporated into the library. In HCDR3, >2×10⁶ unique human sequences were incorporated. The library was constructed using overlap extension PCR by standard methods using gBlocks (IDT) and synthesized oligo pools.

[0167] Ribosome display panning was completed using standard literature protocols (Dreier and Plückthun Methods in Mol Biology 2011, Chapter 21). Panning was completed for three rounds against biotinylated human TIGIT. DNA from the initial library and output from the three panning rounds were sequenced using 600 Cycle MiSeq. Sequencing output was processed, and a variety of strategies were used for candidate selection including round-to-round enrichment, unsupervised learning (clustering), and deep learning (convolutional neural net). A total of 542 unique VHH sequences from the MiSeq were expressed as VHH-Fc fusion proteins and purified by ProA.

[0168] Binding affinities of VHH-Fc proteins to recombinant human TIGIT were measured by SPR using a Carterra instrument (Table 10A). 214 unique VHHs sequences were identified that bound specifically to TIGIT compared to a control protein (TSLP). Average values reported from measurements from 1-2 samples.

[0169] TIGIT/CD155 inhibition of VHH-Fcs were assessed using an ELISA assay (Table 10B). Briefly, human TIGIT-Fc was coated on a plate & then incubated with VHH-Fcs and human CD155-biotin. Bound CD155-biotin was detected using a streptavidin-HRP conjugate visualized with TMB. Strong inhibitors from the single point screen were titrated to determine EC50 (Table 10C).

[0170] Select TIGIT/CD155 inhibitors were assessed for their ability to enhance T-cell activation in a cell-based assay using PBMCs (Table 10D).

TABLE 10A
SPR Data

| | SPR Kinetics | | |
|---|---|---|---|
| | Average ka | Average kd | |
| Variant | (M − 1 s − 1) | (s − 1) | Average KD (M) |
| TIGIT-SC3 | 4.71E+06 | 1.00E−05 | 5.02E−12 |
| TIGIT-SC14 | 1.95E+06 | 1.00E−05 | 5.13E−12 |
| TIGIT-SC34 | 1.31E+06 | 1.00E−05 | 1.05E−11 |
| TIGIT-SC58 | 8.60E+05 | 1.00E−05 | 1.18E−11 |
| TIGIT-SC39 | 3.42E+05 | 1.00E−05 | 4.23E−11 |
| TIGIT-SC36 | 7.98E+04 | 1.00E−05 | 1.25E−10 |
| TIGIT-SC63 | 6.43E+04 | 1.00E−05 | 1.56E−10 |
| TIGIT-SC47 | 4.89E+04 | 1.00E−05 | 2.04E−10 |
| TIGIT-SC170 | 4.50E+04 | 1.00E−05 | 2.22E−10 |
| TIGIT-SC10 | 5.66E+05 | 2.00E−04 | 3.28E−10 |
| TIGIT-SC97 | 9.42E+05 | 2.31E−04 | 4.47E−10 |
| TIGIT-SC1 | 2.46E+05 | 1.65E−04 | 4.67E−10 |
| TIGIT-SC38 | 4.69E+05 | 2.37E−04 | 5.05E−10 |
| TIGIT-SC107 | 2.13E+05 | 1.48E−04 | 6.93E−10 |
| TIGIT-SC48 | 7.72E+06 | 5.51E−03 | 7.13E−10 |
| TIGIT-SC19 | 1.12E+06 | 1.20E−03 | 1.07E−09 |
| TIGIT-SC36 | 2.56E+06 | 2.72E−03 | 1.14E−09 |
| TIGIT-SC110 | 5.31E+05 | 7.65E−04 | 1.44E−09 |
| TIGIT-SC134 | 6.09E+04 | 8.98E−05 | 1.47E−09 |
| TIGIT-SC113 | 2.57E+05 | 4.83E−04 | 1.88E−09 |
| TIGIT-SC78 | 2.44E+05 | 4.93E−04 | 2.02E−09 |
| TIGIT-SC77 | 1.17E+06 | 8.37E−04 | 2.07E−09 |
| TIGIT-SC95 | 1.38E+06 | 3.52E−03 | 2.55E−09 |
| TIGIT-SC20 | 2.60E+05 | 7.00E−04 | 2.70E−09 |
| TIGIT-SC13 | 6.01E+04 | 1.99E−04 | 3.08E−09 |
| TIGIT-SC24 | 5.06E+05 | 8.94E−04 | 3.08E−09 |
| TIGIT-SC84 | 3.18E+03 | 1.00E−05 | 3.15E−09 |
| TIGIT-SC54 | 3.00E+06 | 9.82E−03 | 3.71E−09 |
| TIGIT-SC116 | 2.09E+05 | 6.96E−04 | 4.08E−09 |
| TIGIT-SC111 | 1.70E+06 | 7.43E−03 | 4.37E−09 |
| TIGIT-SC46 | 1.01E+06 | 4.16E−03 | 4.45E−09 |
| TIGIT-SC121 | 3.44E+05 | 1.12E−03 | 4.68E−09 |
| TIGIT-SC172 | 4.48E+05 | 2.14E−03 | 4.69E−09 |
| TIGIT-SC31 | 1.31E+06 | 6.20E−03 | 4.74E−09 |
| TIGIT-SC51 | 2.10E+06 | 9.81E−03 | 5.15E−09 |
| TIGIT-SC200 | 2.90E+05 | 1.43E−03 | 5.34E−09 |
| TIGIT-SC91 | 1.31E+06 | 7.10E−03 | 5.42E−09 |
| TIGIT-SC68 | 1.87E+06 | 1.03E−02 | 5.49E−09 |
| TIGIT-SC98 | 2.37E+05 | 1.37E−03 | 5.79E−09 |
| TIGIT-SC214 | 4.05E+06 | 2.48E−02 | 6.13E−09 |
| TIGIT-SC4 | 3.56E+05 | 2.22E−03 | 6.24E−09 |
| TIGIT-SC33 | 1.82E+05 | 1.07E−03 | 6.72E−09 |
| TIGIT-SC86 | 3.41E+05 | 2.12E−03 | 7.14E−09 |
| TIGIT-SC75 | 5.05E+04 | 3.76E−04 | 7.44E−09 |
| TIGIT-SC21 | 8.66E+04 | 5.78E−04 | 7.57E−09 |
| TIGIT-SC76 | 9.38E+05 | 7.17E−03 | 7.64E−09 |
| TIGIT-SC106 | 9.55E+04 | 7.53E−04 | 7.99E−09 |
| TIGIT-SC115 | 2.62E+05 | 2.41E−03 | 8.42E−09 |
| TIGIT-SC108 | 2.03E+05 | 1.81E−03 | 8.90E−09 |
| TIGIT-SC197 | 1.68E+05 | 1.56E−03 | 9.35E−09 |
| TIGIT-SC9 | 2.68E+05 | 1.59E−03 | 9.35E−09 |
| TIGIT-SC117 | 1.25E+05 | 1.20E−03 | 9.63E−09 |
| TIGIT-SC62 | 1.00E+04 | 1.00E−04 | 1.00E−08 |
| TIGIT-SC71 | 4.13E+05 | 4.36E−03 | 1.05E−08 |
| TIGIT-SC122 | 5.24E+05 | 2.17E−03 | 1.07E−08 |
| TIGIT-SC70 | 3.21E+05 | 3.59E−03 | 1.12E−08 |
| TIGIT-SC40 | 1.37E+05 | 1.50E−03 | 1.14E−08 |
| TIGIT-SC43 | 1.12E+05 | 1.30E−03 | 1.20E−08 |
| TIGIT-SC7 | 3.06E+05 | 3.72E−03 | 1.21E−08 |
| TIGIT-SC207 | 5.28E+05 | 3.71E−03 | 1.22E−08 |
| TIGIT-SC69 | 2.19E+05 | 2.76E−03 | 1.26E−08 |
| TIGIT-SC184 | 1.11E+06 | 1.40E−02 | 1.27E−08 |
| TIGIT-SC211 | 6.54E+03 | 8.53E−05 | 1.30E−08 |
| TIGIT-SC112 | 2.97E+05 | 3.93E−03 | 1.32E−08 |
| TIGIT-SC175 | 1.01E+05 | 1.24E−03 | 1.44E−08 |
| TIGIT-SC49 | 1.29E+05 | 1.02E−03 | 1.44E−08 |
| TIGIT-SC8 | 1.56E+05 | 7.53E−04 | 1.46E−08 |
| TIGIT-SC159 | 9.20E+04 | 1.44E−03 | 1.46E−08 |
| TIGIT-SC100 | 1.22E+05 | 1.83E−03 | 1.51E−08 |
| TIGIT-SC104 | 2.47E+05 | 3.75E−03 | 1.52E−08 |
| TIGIT-SC81 | 1.69E+05 | 2.33E−03 | 1.53E−08 |
| TIGIT-SC206 | 1.00E+06 | 1.57E−02 | 1.56E−08 |
| TIGIT-SC18 | 1.41E+05 | 2.25E−03 | 1.63E−08 |
| TIGIT-SC32 | 1.47E+05 | 2.43E−03 | 1.66E−08 |
| TIGIT-SC151 | 2.85E+05 | 4.79E−03 | 1.68E−08 |
| TIGIT-SC212 | 7.41E+04 | 1.26E−03 | 1.71E−08 |
| TIGIT-SC187 | 3.40E+04 | 5.86E−04 | 1.72E−08 |
| TIGIT-SC52 | 1.01E+05 | 1.75E−03 | 1.77E−08 |
| TIGIT-SC22 | 7.03E+04 | 1.18E−03 | 1.77E−08 |
| TIGIT-SC74 | 1.83E+05 | 3.29E−03 | 1.80E−08 |
| TIGIT-SC67 | 2.24E+05 | 4.02E−03 | 1.80E−08 |
| TIGIT-SC126 | 8.71E+05 | 1.30E−02 | 1.86E−08 |
| TIGIT-SC41 | 6.31E+05 | 1.18E−02 | 1.92E−08 |
| TIGIT-SC6 | 6.67E+04 | 1.29E−03 | 1.94E−08 |
| TIGIT-SC64 | 2.07E+05 | 3.43E−03 | 1.96E−08 |
| TIGIT-SC119 | 1.96E+05 | 3.67E−03 | 1.97E−08 |
| TIGIT-SC136 | 2.09E+05 | 2.54E−03 | 2.04E−08 |
| TIGIT-SC167 | 1.64E+05 | 3.49E−03 | 2.13E−08 |
| TIGIT-SC180 | 4.65E+05 | 1.01E−02 | 2.17E−08 |
| TIGIT-SC73 | 1.26E+05 | 2.76E−03 | 2.18E−08 |
| TIGIT-SC88 | 9.25E+04 | 2.04E−03 | 2.20E−08 |
| TIGIT-SC2 | 1.24E+05 | 2.74E−03 | 2.21E−08 |
| TIGIT-SC154 | 1.30E+05 | 2.19E−03 | 2.25E−08 |
| TIGIT-SC25 | 7.72E+04 | 1.74E−03 | 2.25E−08 |
| TIGIT-SC12 | 2.21E+05 | 4.90E−03 | 2.28E−08 |
| TIGIT-SC37 | 2.14E+05 | 5.07E−03 | 2.37E−08 |
| TIGIT-SC28 | 7.51E+04 | 1.79E−03 | 2.39E−08 |
| TIGIT-SC147 | 3.83E+05 | 1.15E−02 | 2.40E−08 |
| TIGIT-SC190 | 7.84E+04 | 1.50E−03 | 2.43E−08 |
| TIGIT-SC166 | 5.84E+04 | 1.47E−03 | 2.49E−08 |
| TIGIT-SC57 | 1.49E+05 | 5.11E−03 | 2.52E−08 |
| TIGIT-SC56 | 2.98E+04 | 8.01E−04 | 2.69E−08 |
| TIGIT-SC198 | 1.03E+05 | 2.85E−03 | 2.76E−08 |
| TIGIT-SC80 | 6.32E+04 | 1.79E−03 | 2.83E−08 |
| TIGIT-SC55 | 9.06E+04 | 2.31E−03 | 2.85E−08 |
| TIGIT-SC87 | 1.96E+05 | 5.64E−03 | 2.87E−08 |
| TIGIT-SC83 | 1.32E+05 | 3.78E−03 | 2.91E−08 |
| TIGIT-SC89 | 1.06E+05 | 2.94E−03 | 3.08E−08 |
| TIGIT-SC160 | 1.05E+05 | 2.65E−03 | 3.16E−08 |
| TIGIT-SC127 | 5.01E+05 | 1.64E−02 | 3.28E−08 |
| TIGIT-SC102 | 4.35E+04 | 1.46E−03 | 3.35E−08 |
| TIGIT-SC161 | 5.71E+04 | 1.46E−03 | 3.39E−08 |
| TIGIT-SC103 | 1.45E+05 | 4.98E−03 | 3.43E−08 |
| TIGIT-SC149 | 1.23E+05 | 4.30E−03 | 3.50E−08 |
| TIGIT-SC44 | 3.54E+05 | 1.24E−02 | 3.51E−08 |
| TIGIT-SC213 | 7.84E+04 | 2.85E−03 | 3.64E−08 |
| TIGIT-SC66 | 2.97E+04 | 1.16E−03 | 3.91E−08 |
| TIGIT-SC144 | 1.40E+05 | 5.74E−03 | 4.10E−08 |
| TIGIT-SC131 | 6.77E+05 | 2.78E−02 | 4.10E−08 |
| TIGIT-SC209 | 1.51E+04 | 6.25E−04 | 4.14E−08 |
| TIGIT-SC133 | 1.58E+05 | 5.61E−03 | 4.19E−08 |
| TIGIT-SC129 | 4.37E+04 | 1.91E−03 | 4.39E−08 |
| TIGIT-SC85 | 8.76E+03 | 5.99E−04 | 4.46E−08 |
| TIGIT-SC65 | 1.09E+06 | 2.49E−02 | 4.49E−08 |
| TIGIT-SC114 | 5.07E+04 | 2.27E−03 | 4.52E−08 |
| TIGIT-SC128 | 1.58E+05 | 7.08E−03 | 4.54E−08 |
| TIGIT-SC132 | 1.97E+05 | 3.47E−03 | 4.56E−08 |
| TIGIT-SC123 | 4.91E+04 | 2.32E−03 | 4.73E−08 |
| TIGIT-SC17 | 3.12E+04 | 1.49E−03 | 4.79E−08 |
| TIGIT-SC145 | 2.26E+05 | 1.08E−02 | 4.79E−08 |
| TIGIT-SC72 | 3.49E+04 | 1.68E−03 | 4.81E−08 |
| TIGIT-SC93 | 8.15E+04 | 4.07E−03 | 4.99E−08 |
| TIGIT-SC124 | 1.05E+05 | 5.31E−03 | 5.10E−08 |
| TIGIT-SC171 | 9.02E+04 | 4.41E−03 | 5.10E−08 |
| TIGIT-SC179 | 5.04E+04 | 2.69E−03 | 5.11E−08 |
| TIGIT-SC5 | 4.20E+04 | 2.16E−03 | 5.14E−08 |
| TIGIT-SC99 | 8.16E+04 | 4.28E−03 | 5.24E−08 |
| TIGIT-SC16 | 8.01E+04 | 3.87E−03 | 5.26E−08 |
| TIGIT-SC183 | 9.04E+04 | 4.95E−03 | 5.52E−08 |
| TIGIT-SC139 | 1.41E+05 | 7.78E−03 | 5.52E−08 |
| TIGIT-SC53 | 4.88E+04 | 2.70E−03 | 5.54E−08 |
| TIGIT-SC164 | 5.28E+04 | 2.58E−03 | 5.57E−08 |
| TIGIT-SC79 | 7.95E+04 | 4.45E−03 | 5.60E−08 |
| TIGIT-SC82 | 5.67E+04 | 3.24E−03 | 5.70E−08 |
| TIGIT-SC29 | 4.87E+04 | 2.87E−03 | 5.92E−08 |
| TIGIT-SC61 | 6.30E+04 | 3.70E−03 | 5.92E−08 |
| TIGIT-SC90 | 5.05E+04 | 3.01E−03 | 5.95E−08 |
| TIGIT-SC182 | 1.19E+05 | 7.22E−03 | 6.06E−08 |
| TIGIT-SC125 | 1.42E+05 | 8.07E−03 | 6.13E−08 |
| TIGIT-SC15 | 1.43E+05 | 8.14E−03 | 6.20E−08 |
| TIGIT-SC165 | 9.33E+04 | 4.84E−03 | 6.25E−08 |
| TIGIT-SC120 | 6.76E+04 | 4.78E−03 | 6.61E−08 |
| TIGIT-SC142 | 3.20E+05 | 2.13E−02 | 6.65E−08 |
| TIGIT-SC204 | 5.08E+04 | 3.39E−03 | 6.67E−08 |
| TIGIT-SC30 | 2.31E+05 | 1.55E−02 | 6.73E−08 |
| TIGIT-SC140 | 6.89E+04 | 4.74E−03 | 6.87E−08 |
| TIGIT-SC130 | 7.20E+04 | 5.26E−03 | 7.30E−08 |
| TIGIT-SC101 | 6.78E+04 | 4.21E−03 | 7.34E−08 |
| TIGIT-SC188 | 4.25E+04 | 3.09E−03 | 7.71E−08 |
| TIGIT-SC185 | 1.41E+05 | 6.21E−03 | 8.03E−08 |
| TIGIT-SC27 | 8.09E+04 | 6.24E−03 | 8.06E−08 |
| TIGIT-SC168 | 3.04E+04 | 2.54E−03 | 8.36E−08 |
| TIGIT-SC60 | 2.18E+04 | 1.84E−03 | 8.46E−08 |
| TIGIT-SC163 | 3.84E+04 | 2.69E−03 | 8.64E−08 |
| TIGIT-SC150 | 2.12E+05 | 2.12E−02 | 9.98E−08 |
| TIGIT-SC137 | 6.75E+04 | 6.88E−03 | 1.02E−07 |
| TIGIT-SC45 | 8.99E+04 | 9.29E−03 | 1.03E−07 |
| TIGIT-SC92 | 2.75E+04 | 2.89E−03 | 1.05E−07 |
| TIGIT-SC96 | 1.66E+05 | 1.76E−02 | 1.13E−07 |
| TIGIT-SC118 | 2.97E+04 | 2.52E−03 | 1.14E−07 |
| TIGIT-SC205 | 7.18E+05 | 8.54E−02 | 1.19E−07 |
| TIGIT-SC109 | 3.87E+04 | 4.68E−03 | 1.21E−07 |
| TIGIT-SC174 | 4.44E+05 | 3.35E−02 | 1.24E−07 |
| TIGIT-SC162 | 6.22E+05 | 2.03E−02 | 1.26E−07 |
| TIGIT-SC155 | 5.13E+04 | 6.47E−03 | 1.26E−07 |
| TIGIT-SC192 | 5.45E+05 | 7.15E−02 | 1.31E−07 |
| TIGIT-SC158 | 1.82E+04 | 1.54E−03 | 1.43E−07 |
| TIGIT-SC186 | 9.87E+04 | 5.00E−03 | 1.70E−07 |
| TIGIT-SC105 | 6.16E+04 | 1.16E−02 | 1.89E−07 |
| TIGIT-SC178 | 2.62E+05 | 7.76E−02 | 2.96E−07 |
| TIGIT-SC199 | 3.99E+05 | 1.28E−01 | 3.21E−07 |
| TIGIT-SC177 | 4.86E+04 | 2.79E−03 | 3.40E−07 |
| TIGIT-SC181 | 4.28E+05 | 1.68E−01 | 3.93E−07 |
| TIGIT-SC191 | 3.13E+05 | 1.25E−01 | 4.01E−07 |
| TIGIT-SC143 | 5.04E+05 | 2.39E−01 | 4.74E−07 |
| TIGIT-SC195 | 2.96E+05 | 1.42E−01 | 4.78E−07 |
| TIGIT-SC94 | 4.92E+04 | 2.70E−02 | 5.49E−07 |
| TIGIT-SC202 | 9.38E+04 | 9.34E−02 | 6.25E−07 |
| TIGIT-SC193 | 2.11E+05 | 1.78E−01 | 8.41E−07 |
| TIGIT-SC208 | 2.31E+05 | 1.96E−01 | 8.51E−07 |
| TIGIT-SC189 | 8.88E+03 | 5.28E−03 | 8.83E−07 |
| TIGIT-SC141 | 1.67E+05 | 1.51E−01 | 9.03E−07 |
| TIGIT-SC203 | 1.53E+05 | 1.40E−01 | 9.14E−07 |
| TIGIT-SC169 | 2.11E+05 | 2.06E−01 | 9.78E−07 |
| TIGIT-SC146 | 2.26E+05 | 2.40E−01 | 1.06E−06 |
| TIGIT-SC173 | 1.48E+05 | 1.77E−01 | 1.19E−06 |
| TIGIT-SC148 | 1.21E+05 | 1.60E−01 | 1.32E−06 |
| TIGIT-SC42 | 1.41E+05 | 1.97E−01 | 1.40E−06 |
| TIGIT-SC152 | 1.06E+05 | 1.55E−01 | 1.47E−06 |
| TIGIT-SC201 | 5.67E+02 | 9.01E−04 | 1.59E−06 |
| TIGIT-SC135 | 1.26E+05 | 2.10E−01 | 1.67E−06 |
| TIGIT-SC35 | 2.91E+04 | 1.26E−03 | 2.33E−06 |
| TIGIT-SC50 | 2.07E+05 | 1.98E−03 | 3.13E−06 |
| TIGIT-SC156 | 2.74E+03 | 1.35E−03 | 4.63E−06 |
| TIGIT-SC23 | 7.45E+04 | 4.50E−03 | 4.80E−06 |
| TIGIT-SC210 | 4.07E+04 | 2.58E−01 | 6.33E−06 |
| TIGIT-SC138 | 4.97E+04 | 3.63E−01 | 7.30E−06 |
| TIGIT-SC176 | 2.24E+04 | 2.84E−03 | 8.78E−06 |
| TIGIT-SC11 | 1.70E+04 | 1.10E−03 | 2.15E−05 |
| TIGIT-SC26 | 1.34E+02 | 6.66E−03 | 4.98E−05 |
| TIGIT-SC194 | 7.32E+01 | 5.63E−03 | 7.68E−05 |
| TIGIT-SC196 | 1.43E+02 | 6.92E−03 | 1.12E−04 |
| TIGIT-SC59 | 3.30E+04 | 2.37E−03 | 1.51E−04 |
| TIGIT-SC157 | 1.79E+01 | 5.40E−03 | 3.02E−04 |

TABLE 10B
TIGIT/CD155 Competition ELISA (Single Point Data)

| Variant | OD (450 nm) |
|---|---|
| Tiragolumab | 0.0858 |
| No Antibody | 1.30265 |
| TIGIT-SC1 | 0.6489 |
| TIGIT-SC2 | 0.40715 |
| TIGIT-SC3 | 0.7484 |
| TIGIT-SC215 | 0.2578 |
| TIGIT-SC216 | 0.6247 |
| TIGIT-SC217 | 0.60535 |
| TIGIT-SC218 | 0.5262 |
| TIGIT-SC219 | 0.5734 |
| TIGIT-SC4 | 0.57925 |
| TIGIT-SC5 | 0.5641 |
| TIGIT-SC6 | 0.55775 |
| TIGIT-SC7 | 0.7353 |
| TIGIT-SC220 | 0.57615 |
| TIGIT-SC8 | 0.81665 |
| TIGIT-SC221 | 0.5176 |
| TIGIT-SC222 | 0.5599 |
| TIGIT-SC9 | 0.75585 |
| TIGIT-SC10 | 0.75615 |
| TIGIT-SC11 | 0.543 |
| TIGIT-SC223 | 0.5585 |
| TIGIT-SC12 | 0.62215 |
| TIGIT-SC13 | 0.66555 |
| TIGIT-SC224 | 0.6316 |
| TIGIT-SC14 | 0.61005 |
| TIGIT-SC15 | 0.57565 |
| TIGIT-SC225 | 0.4486 |
| TIGIT-SC16 | 0.47065 |
| TIGIT-SC17 | 0.55265 |
| TIGIT-SC18 | 0.71615 |
| TIGIT-SC19 | 0.74635 |
| TIGIT-SC20 | 0.72555 |
| TIGIT-SC21 | 0.60745 |
| TIGIT-SC22 | 0.5518 |
| TIGIT-SC23 | 0.42355 |
| TIGIT-SC24 | 0.0781 |
| TIGIT-SC25 | 0.46865 |
| TIGIT-SC226 | 0.5456 |
| TIGIT-SC26 | 0.52535 |
| TIGIT-SC27 | 0.50465 |
| TIGIT-SC227 | 0.3918 |
| TIGIT-SC28 | 0.5391 |
| TIGIT-SC228 | 0.5126 |
| TIGIT-SC29 | 0.39945 |
| TIGIT-SC30 | 0.49495 |
| TIGIT-SC229 | 0.32485 |
| TIGIT-SC230 | 0.51235 |
| TIGIT-SC31 | 0.12485 |
| TIGIT-SC32 | 0.85965 |
| TIGIT-SC33 | 0.764 |
| TIGIT-SC231 | 0.4877 |
| TIGIT-SC232 | 0.50225 |
| TIGIT-SC34 | 0.3995 |
| TIGIT-SC35 | 0.4203 |
| TIGIT-SC233 | 0.36835 |
| TIGIT-SC36 | 0.14355 |
| TIGIT-SC37 | 0.34055 |
| TIGIT-SC234 | 0.35915 |
| TIGIT-SC38 | 0.14255 |
| TIGIT-SC39 | 0.6521 |
| TIGIT-SC40 | 0.6129 |
| TIGIT-SC41 | 0.09205 |
| TIGIT-SC42 | 0.3413 |
| TIGIT-SC43 | 0.63995 |
| TIGIT-SC235 | 0.34725 |
| TIGIT-SC44 | 0.3591 |
| TIGIT-SC45 | 0.35895 |
| TIGIT-SC46 | 0.1105 |
| TIGIT-SC47 | 0.69015 |
| TIGIT-SC48 | 0.3809 |
| TIGIT-SC49 | 0.38195 |
| TIGIT-SC50 | 0.40565 |
| TIGIT-SC51 | 0.1294 |
| TIGIT-SC52 | 0.3509 |
| TIGIT-SC236 | 0.3752 |
| TIGIT-SC237 | 0.6921 |
| TIGIT-SC238 | 0.3958 |
| TIGIT-SC55 | 0.3636 |
| TIGIT-SC56 | 0.3352 |
| TIGIT-SC239 | 0.3568 |
| TIGIT-SC57 | 0.0807 |
| TIGIT-SC58 | 0.0846 |
| TIGIT-SC59 | 0.65915 |
| TIGIT-SC60 | 0.3488 |
| TIGIT-SC61 | 0.3426 |
| TIGIT-SC62 | 0.324 |
| TIGIT-SC63 | 0.0781 |
| TIGIT-SC240 | 0.3429 |
| TIGIT-SC64 | 0.19715 |
| TIGIT-SC65 | 0.0846 |
| TIGIT-SC66 | 0.3251 |
| TIGIT-SC241 | 0.32435 |
| TIGIT-SC67 | 0.1488 |
| TIGIT-SC242 | 0.3421 |
| TIGIT-SC243 | 0.85795 |
| TIGIT-SC244 | 0.76695 |
| TIGIT-SC68 | 0.60745 |
| TIGIT-SC245 | 0.85405 |
| TIGIT-SC69 | 0.66555 |
| TIGIT-SC70 | 0.63995 |
| TIGIT-SC246 | 0.74795 |
| TIGIT-SC247 | 0.8485 |
| TIGIT-SC248 | 0.8305 |
| TIGIT-SC249 | 0.78005 |
| TIGIT-SC250 | 0.7965 |
| TIGIT-SC71 | 0.86775 |
| TIGIT-SC72 | 0.39415 |
| TIGIT-SC73 | 0.40465 |
| TIGIT-SC74 | 0.6489 |
| TIGIT-SC251 | 1.1371 |
| TIGIT-SC75 | 0.6521 |
| TIGIT-SC252 | 0.74985 |
| TIGIT-SC76 | 0.6726 |
| TIGIT-SC253 | 1.1274 |
| TIGIT-SC254 | 0.7276 |
| TIGIT-SC255 | 0.75425 |
| TIGIT-SC79 | 0.7996 |
| TIGIT-SC80 | 0.5077 |
| TIGIT-SC256 | 0.2556 |
| TIGIT-SC81 | 0.553 |
| TIGIT-SC257 | 0.2558 |
| TIGIT-SC258 | 0.35305 |
| TIGIT-SC259 | 0.47055 |
| TIGIT-SC82 | 0.25015 |
| TIGIT-SC83 | 0.2413 |
| TIGIT-SC260 | 0.5374 |
| TIGIT-SC85 | 0.7682 |
| TIGIT-SC261 | 0.76785 |
| TIGIT-SC86 | 0.71615 |
| TIGIT-SC87 | 0.43805 |
| TIGIT-SC88 | 0.48375 |
| TIGIT-SC262 | 0.221 |
| TIGIT-SC89 | 0.38415 |
| TIGIT-SC90 | 0.51945 |
| TIGIT-SC91 | 0.4836 |
| TIGIT-SC92 | 0.59335 |
| TIGIT-SC93 | 0.3071 |
| TIGIT-SC263 | 0.7769 |
| TIGIT-SC264 | 0.6826 |
| TIGIT-SC94 | 0.51305 |
| TIGIT-SC265 | 0.6681 |
| TIGIT-SC266 | 0.6048 |
| TIGIT-SC267 | 0.8641 |
| TIGIT-SC268 | 0.79705 |
| TIGIT-SC269 | 0.56935 |
| TIGIT-SC270 | 0.8072 |
| TIGIT-SC271 | 0.8173 |
| TIGIT-SC95 | 0.6129 |
| TIGIT-SC96 | 0.6773 |
| TIGIT-SC97 | 0.1105 |
| TIGIT-SC272 | 0.87295 |
| TIGIT-SC273 | 0.86145 |
| TIGIT-SC274 | 0.73675 |
| TIGIT-SC275 | 0.45395 |
| TIGIT-SC276 | 0.73455 |
| TIGIT-SC277 | 0.6988 |
| TIGIT-SC278 | 0.76425 |
| TIGIT-SC279 | 0.76575 |
| TIGIT-SC280 | 0.73775 |
| TIGIT-SC281 | 0.8082 |
| TIGIT-SC282 | 0.73965 |
| TIGIT-SC283 | 0.51515 |
| TIGIT-SC284 | 0.57185 |
| TIGIT-SC99 | 0.6349 |
| TIGIT-SC285 | 0.45695 |
| TIGIT-SC100 | 0.6921 |
| TIGIT-SC101 | 0.3939 |
| TIGIT-SC102 | 0.31055 |
| TIGIT-SC286 | 0.68725 |
| TIGIT-SC287 | 0.63785 |
| TIGIT-SC288 | 0.7054 |
| TIGIT-SC289 | 0.71585 |
| TIGIT-SC290 | 0.70395 |
| TIGIT-SC291 | 0.641 |
| TIGIT-SC103 | 0.6657 |
| TIGIT-SC104 | 0.70065 |
| TIGIT-SC292 | 0.65575 |
| TIGIT-SC105 | 0.95885 |
| TIGIT-SC293 | 0.62475 |
| TIGIT-SC294 | 0.6192 |
| TIGIT-SC295 | 0.58745 |
| TIGIT-SC296 | 0.65535 |
| TIGIT-SC297 | 0.6885 |
| TIGIT-SC298 | 0.67375 |
| TIGIT-SC299 | 0.70855 |
| TIGIT-SC300 | 0.60365 |
| TIGIT-SC301 | 0.5349 |
| TIGIT-SC302 | 0.19715 |
| TIGIT-SC303 | 0.25445 |
| TIGIT-SC304 | 0.61255 |
| TIGIT-SC133 | 0.2838 |
| TIGIT-SC305 | 0.8976 |
| TIGIT-SC306 | 0.9111 |
| TIGIT-SC307 | 0.6851 |
| TIGIT-SC308 | 0.6897 |
| TIGIT-SC309 | 0.95305 |
| TIGIT-SC134 | 0.84455 |
| TIGIT-SC310 | 0.83975 |
| TIGIT-SC311 | 0.44445 |
| TIGIT-SC135 | 0.8266 |
| TIGIT-SC312 | 0.79005 |
| TIGIT-SC313 | 0.8208 |
| TIGIT-SC314 | 0.75885 |
| TIGIT-SC315 | 0.73745 |
| TIGIT-SC316 | 0.42435 |
| TIGIT-SC317 | 0.31965 |
| TIGIT-SC318 | 0.72165 |
| TIGIT-SC136 | 0.57085 |
| TIGIT-SC137 | 0.3058 |
| TIGIT-SC138 | 0.3926 |
| TIGIT-SC319 | 0.7437 |
| TIGIT-SC320 | 0.41785 |
| TIGIT-SC321 | 0.4989 |
| TIGIT-SC139 | 0.50995 |
| TIGIT-SC322 | 0.6802 |
| TIGIT-SC323 | 0.7588 |
| TIGIT-SC140 | 0.7079 |
| TIGIT-SC324 | 0.70715 |
| TIGIT-SC325 | 0.56425 |
| TIGIT-SC141 | 0.63265 |
| TIGIT-SC142 | 0.69005 |
| TIGIT-SC143 | 0.62555 |
| TIGIT-SC144 | 0.686 |
| TIGIT-SC326 | 0.63855 |
| TIGIT-SC327 | 0.2969 |
| TIGIT-SC328 | 0.66725 |
| TIGIT-SC329 | 0.6544 |
| TIGIT-SC145 | 0.43155 |
| TIGIT-SC330 | 0.768 |
| TIGIT-SC331 | 0.43205 |
| TIGIT-SC332 | 0.53785 |
| TIGIT-SC333 | 0.54875 |
| TIGIT-SC334 | 0.33885 |
| TIGIT-SC335 | 0.71505 |
| TIGIT-SC336 | 0.6681 |
| TIGIT-SC337 | 0.5962 |
| TIGIT-SC338 | 0.3973 |
| TIGIT-SC339 | 0.27895 |
| TIGIT-SC340 | 0.4914 |
| TIGIT-SC146 | 0.42325 |
| TIGIT-SC341 | 0.4085 |
| TIGIT-SC342 | 0.4068 |
| TIGIT-SC343 | 0.4524 |
| TIGIT-SC147 | 0.8782 |
| TIGIT-SC148 | 0.51965 |
| TIGIT-SC344 | 0.4902 |
| TIGIT-SC345 | 0.53045 |
| TIGIT-SC346 | 0.41315 |
| TIGIT-SC149 | 0.2632 |
| TIGIT-SC347 | 0.4019 |
| TIGIT-SC348 | 0.4694 |
| TIGIT-SC150 | 0.44515 |
| TIGIT-SC349 | 0.31165 |
| TIGIT-SC151 | 0.2061 |
| TIGIT-SC152 | 0.25915 |
| TIGIT-SC350 | 0.49045 |
| TIGIT-SC351 | 0.46825 |
| TIGIT-SC352 | 0.47545 |
| TIGIT-SC353 | 0.44145 |
| TIGIT-SC153 | 0.8005 |
| TIGIT-SC354 | 0.4605 |
| TIGIT-SC355 | 0.45655 |
| TIGIT-SC154 | 0.46525 |
| TIGIT-SC155 | 0.449 |
| TIGIT-SC356 | 0.36155 |
| TIGIT-SC357 | 0.45475 |
| TIGIT-SC358 | 0.4234 |
| TIGIT-SC156 | 0.70065 |
| TIGIT-SC359 | 0.45165 |
| TIGIT-SC157 | 0.4139 |
| TIGIT-SC158 | 0.4716 |
| TIGIT-SC159 | 0.7486 |
| TIGIT-SC160 | 0.467 |
| TIGIT-SC161 | 0.45055 |
| TIGIT-SC360 | 0.4189 |
| TIGIT-SC162 | 0.42315 |
| TIGIT-SC361 | 0.40845 |
| TIGIT-SC362 | 0.41275 |
| TIGIT-SC163 | 0.32815 |
| TIGIT-SC164 | 0.3627 |
| TIGIT-SC363 | 0.6968 |
| TIGIT-SC165 | 0.32425 |
| TIGIT-SC166 | 0.3278 |
| TIGIT-SC167 | 0.2794 |
| TIGIT-SC168 | 0.30585 |
| TIGIT-SC169 | 0.67905 |
| TIGIT-SC364 | 0.6022 |
| TIGIT-SC171 | 0.57095 |
| TIGIT-SC173 | 0.5783 |
| TIGIT-SC174 | 0.53225 |
| TIGIT-SC365 | 0.5277 |
| TIGIT-SC175 | 0.5897 |
| TIGIT-SC366 | 0.538 |
| TIGIT-SC367 | 0.57175 |
| TIGIT-SC176 | 0.57015 |
| TIGIT-SC368 | 0.58545 |
| TIGIT-SC369 | 0.52675 |
| TIGIT-SC177 | 0.50745 |
| TIGIT-SC178 | 0.4939 |
| TIGIT-SC179 | 0.59125 |
| TIGIT-SC180 | 0.63925 |
| TIGIT-SC181 | 0.5542 |
| TIGIT-SC370 | 0.64 |
| TIGIT-SC371 | 0.53335 |
| TIGIT-SC182 | 0.60745 |
| TIGIT-SC372 | 0.6094 |
| TIGIT-SC183 | 0.5002 |
| TIGIT-SC184 | 0.534 |
| TIGIT-SC186 | 0.57605 |
| TIGIT-SC373 | 0.54145 |
| TIGIT-SC188 | 0.52405 |
| TIGIT-SC374 | 0.50405 |
| TIGIT-SC189 | 0.48585 |
| TIGIT-SC190 | 0.53295 |
| TIGIT-SC375 | 0.4826 |
| TIGIT-SC191 | 0.4902 |
| TIGIT-SC376 | 0.5039 |
| TIGIT-SC377 | 0.4947 |
| TIGIT-SC192 | 0.48715 |
| TIGIT-SC193 | 0.15075 |
| TIGIT-SC194 | 0.4788 |
| TIGIT-SC378 | 0.4685 |
| TIGIT-SC195 | 0.4264 |
| TIGIT-SC379 | 0.43095 |
| TIGIT-SC380 | 0.37675 |
| TIGIT-SC381 | 0.3807 |
| TIGIT-SC382 | 0.78415 |
| TIGIT-SC383 | 0.38095 |
| TIGIT-SC384 | 0.36955 |
| TIGIT-SC196 | 0.37365 |
| TIGIT-SC385 | 0.34715 |
| TIGIT-SC386 | 0.6012 |
| TIGIT-SC387 | 0.598 |
| TIGIT-SC388 | 0.5535 |
| TIGIT-SC389 | 0.52155 |
| TIGIT-SC390 | 0.5264 |
| TIGIT-SC198 | 0.5139 |
| TIGIT-SC199 | 0.50275 |
| TIGIT-SC201 | 0.5094 |
| TIGIT-SC202 | 0.5453 |
| TIGIT-SC391 | 0.54615 |
| TIGIT-SC392 | 0.52055 |
| TIGIT-SC393 | 0.5538 |
| TIGIT-SC203 | 0.52115 |
| TIGIT-SC394 | 0.44455 |
| TIGIT-SC204 | 0.44885 |
| TIGIT-SC395 | 0.42855 |
| TIGIT-SC205 | 0.44085 |
| TIGIT-SC396 | 0.45175 |
| TIGIT-SC206 | 0.51705 |
| TIGIT-SC397 | 0.4871 |
| TIGIT-SC398 | 0.5037 |
| TIGIT-SC399 | 0.63865 |
| TIGIT-SC400 | 0.62855 |
| TIGIT-SC401 | 0.6916 |
| TIGIT-SC402 | 0.72345 |
| TIGIT-SC207 | 0.5043 |
| TIGIT-SC208 | 0.5439 |
| TIGIT-SC209 | 0.55955 |
| TIGIT-SC403 | 0.8443 |
| TIGIT-SC210 | 0.5159 |
| TIGIT-SC404 | 0.50095 |
| TIGIT-SC405 | 0.51145 |
| TIGIT-SC406 | 0.53775 |
| TIGIT-SC407 | 0.50995 |
| TIGIT-SC408 | 0.49425 |
| TIGIT-SC409 | 0.6206 |
| TIGIT-SC410 | 0.3602 |
| TIGIT-SC411 | 0.40015 |
| TIGIT-SC412 | 0.4652 |
| TIGIT-SC413 | 0.4365 |
| TIGIT-SC414 | 0.4356 |
| TIGIT-SC399 | 0.63865 |
| TIGIT-SC415 | 0.4537 |
| TIGIT-SC416 | 0.3866 |
| TIGIT-SC417 | 0.4038 |
| TIGIT-SC418 | 0.1116 |
| TIGIT-SC419 | 0.33625 |
| TIGIT-SC420 | 0.42095 |
| TIGIT-SC421 | 0.4243 |
| TIGIT-SC422 | 0.86975 |
| TIGIT-SC423 | 0.94325 |
| TIGIT-SC424 | 0.81885 |
| TIGIT-SC425 | 0.8573 |
| TIGIT-SC426 | 0.91115 |
| TIGIT-SC427 | 0.87225 |
| TIGIT-SC428 | 0.6453 |
| TIGIT-SC429 | 0.36775 |
| TIGIT-SC430 | 0.59975 |
| TIGIT-SC431 | 0.64965 |
| TIGIT-SC432 | 0.75995 |
| TIGIT-SC433 | 0.85755 |
| TIGIT-SC434 | 0.79065 |
| TIGIT-SC435 | 0.76555 |
| TIGIT-SC436 | 0.3847 |
| TIGIT-SC437 | 0.19365 |
| TIGIT-SC438 | 0.38735 |
| TIGIT-SC439 | 0.51465 |
| TIGIT-SC213 | 0.58685 |
| TIGIT-SC440 | 0.5169 |
| TIGIT-SC441 | 0.2739 |
| TIGIT-SC442 | 0.4691 |
| TIGIT-SC443 | 0.229 |
| TIGIT-SC444 | 0.8383 |
| TIGIT-SC445 | 0.9295 |
| TIGIT-SC446 | 0.81155 |
| TIGIT-SC447 | 0.7788 |
| TIGIT-SC448 | 0.87775 |
| TIGIT-SC449 | 0.78755 |
| TIGIT-SC450 | 0.70845 |
| TIGIT-SC451 | 0.7823 |
| TIGIT-SC452 | 0.57255 |
| TIGIT-SC453 | 0.59105 |
| TIGIT-SC454 | 0.41295 |
| TIGIT-SC455 | 0.5187 |
| TIGIT-SC456 | 0.6898 |
| TIGIT-SC457 | 0.6741 |
| TIGIT-SC458 | 0.7206 |
| TIGIT-SC459 | 0.79555 |
| TIGIT-SC460 | 0.5291 |
| TIGIT-SC461 | 0.60335 |
| TIGIT-SC462 | 0.5749 |
| TIGIT-SC463 | 0.53545 |
| TIGIT-SC464 | 0.4247 |
| TIGIT-SC465 | 0.1587 |
| TIGIT-SC466 | 0.62415 |
| TIGIT-SC467 | 0.61915 |
| TIGIT-SC468 | 0.47905 |
| TIGIT-SC214 | 0.82785 |
| TIGIT-SC469 | 0.7806 |
| TIGIT-SC470 | 0.80065 |
| TIGIT-SC471 | 0.73615 |
| TIGIT-SC472 | 0.79315 |
| TIGIT-SC473 | 0.6645 |
| TIGIT-SC474 | 0.7616 |
| TIGIT-SC475 | 1.0553 |
| TIGIT-SC476 | 0.8741 |
| TIGIT-SC477 | 0.5748 |
| TIGIT-SC478 | 0.6203 |

TABLE 10C
TIGIT/CD155 Competition ELISA (Titration Data)

| Variant | OD (450 nm) |
|---|---|
| Tiragolumab | 5.70E−10 |
| TIGIT-SC38 | 1.81E−10 |
| TIGIT-SC58 | 3.03E−10 |
| TIGIT-SC24 | 4.23E−10 |
| TIGIT-SC97 | 9.71E−10 |
| TIGIT-SC67 | 1.23E−09 |
| TIGIT-SC46 | 1.37E−09 |
| TIGIT-SC57 | 1.53E−09 |
| TIGIT-SC31 | 1.78E−09 |
| TIGIT-SC36 | 2.08E−09 |
| TIGIT-SC51 | 3.47E−09 |
| TIGIT-SC82 | 4.08E−09 |
| TIGIT-SC65 | 4.09E−09 |
| TIGIT-SC151 | 4.14E−09 |
| TIGIT-SC83 | 4.36E−09 |
| TIGIT-SC193 | 4.39E−09 |
| TIGIT-SC418 | 4.80E−09 |
| TIGIT-SC303 | 6.00E−09 |
| TIGIT-SC68 | 6.52E−09 |
| TIGIT-SC257 | 6.57E−09 |
| TIGIT-SC64 | 9.58E−09 |
| TIGIT-SC41 | 1.00E−08 |
| TIGIT-SC441 | 1.02E−08 |
| TIGIT-SC262 | 1.16E−08 |
| TIGIT-SC149 | 1.19E−08 |
| TIGIT-SC437 | 1.22E−08 |
| TIGIT-SC256 | 1.25E−08 |
| TIGIT-SC152 | 1.34E−08 |
| TIGIT-SC302 | 1.38E−08 |
| TIGIT-SC443 | 9.24E−08 |
| TIGIT-SC63 | 1.35E−07 |

TABLE 10D
TIGIT Blockade Enhancement of T Cell Activation

| Variant | T-cell activation EC50 (M) |
|---|---|
| Tiragolumab | 1.35E−08 |
| TIGIT-SC41 | 1.83E−09 |
| TIGIT-SC58 | 2.08E−09 |
| TIGIT-SC97 | 7.11E−09 |
| TIGIT-SC24 | 7.53E−09 |
| TIGIT-SC63 | 8.81E−08 |

### Example 8. Exemplary Sequences

[0171] Sequences for hTIGIT immunoglobulins are seen in Tables 11-19.

TABLE 11
TIGIT sequences

| | | |
|---|---|---|
| SEQ ID | | |
| NO: | IgG | Amino Acid Sequence |

CDRH3

| | | |
|---|---|---|
| 1 | TIGIT-55-01 | CARVAGSSGWAFDYW |
| 2 | TIGIT-55-02 | CATLRLYSSGGGIDYW |
| 3 | TIGIT-55-03 | CARIVGATTRTYYYYGMDVW |
| 4 | TIGIT-55-04 | CARVRNRASDIW |
| 5 | TIGIT-55-05 | CARAPYSSSSWFDYW |
| 6 | TIGIT-55-06 | CARNSYGPPRSFGMDVW |
| 7 | TIGIT-55-07 | CARTPYRSGWADYW |
| 8 | TIGIT-55-08 | CTRSWYYYYGMDVW |
| 9 | TIGIT-55-09 | CARGYGGYGYW |
| 10 | TIGIT-55-10 | CAKAGDYDYYFDYW |
| 11 | TIGIT-55-11 | CASVKRWGYYFNWW |
| 12 | TIGIT-55-12 | CARVRVGAYDAFDIW |
| 13 | TIGIT-55-13 | CARNSGWFMPFDYW |
| 14 | TIGIT-55-14 | CARRGSGWYIDSW |
| 15 | TIGIT-55-15 | CARREGDYMGPNWFDPW |
| 16 | TIGIT-55-16 | CASIRERRFDFW |
| 17 | TIGIT-55-17 | CARHSLTPYNFWSGYYSRSFDIW |

Variable Domain of Heavy Chain

| | | |
|---|---|---|
| 18 | TIGIT-55-01 | EVQLLESGGGLVQPGGSLRLSCAASGFTFGSYGMSWVRQAPGKGL |
| | | EWVSSISGSGSTTYYADSVKGRFTISRDNSKNTLYLQMNSLRAEDT |
| | | AVYYCARVAGSSGWAFDYWGQGTLVTVSS |
| 19 | TIGIT-55-02 | EVQLLESGGGLVQPGGSLRLSCAASGLTFSNYAMTWVRQAPGKGL |
| | | EWVSGISRSGGSTYYADSVKGRFTISRDNSKNTLYLQMNSLRAEDT |
| | | AVYYCATLRLYSSGGGIDYWGQGTLVTVSS |
| 20 | TIGIT-55-03 | EVQLLESGGGLVQPGGSLRLSCAASGFTFHNYAMTWVRQAPGKG |
| | | LEWVSAITGSGTSTYYADSVKGRFTISRDNSKNTLYLQMNSLRAED |
| | | TAVYYCARIVGATTRTYYYYGMDVWGQGTLVTVSS |
| 21 | TIGIT-55-04 | EVQLLESGGGLVQPGGSLRLSCAASGFRFGNYAMSWVRQAPGKG |
| | | LEWVSAITGSGGNTFYADSVKGRFTISRDNSKNTLYLQINSLRAED |
| | | TAVYYCARVRNRASDIWGQGTLVTVSS |
| 22 | TIGIT-55-05 | EVQLLESGGGLVQPGGSLRLSCAASGFVFSSYAMNWVRQAPGKGL |
| | | EWVSTVSGSGGTTYYADSVKGRFTISRDNSKNTLYLQMNSLRAED |
| | | TAVYYCARAPYSSSSWFDYWGQGTLVTVSS |
| 23 | TIGIT-55-06 | EVQLLESGGGLVQPGGSLRLSCAASGFTFSRYTMNWVRQAPGKGL |
| | | EWVSGISGSGGGAYYADSVKGRFTISRDNSKNTLYLQMNSLRAED |
| | | TAVYYCARNSYGPPRSFGMDVWGQGTLVTVSS |
| 24 | TIGIT-55-07 | EVQLLESGGGLVQPGGSLRLSCAASGFTFSSYGMTWVRQAPGKGL |
| | | EWVSAISGRGSSTYYADSVKGRFTISRDNSKNTLYLQMNSLRAEDT |
| | | AVYYCARTPYRSGWADYWGQGTLVTVSS |
| 25 | TIGIT-55-08 | EVQLLESGGGLVQPGGSLRLSCAASGFMFSDYAMSWVRQAPGKG |
| | | LEWVSGISGSGGYTYYADSVKGRFTISRDNSKNTLYLQMNSLRAE |
| | | DTAVYYCTRSWYYYYGMDVWGQGTLVTVSS |
| 26 | TIGIT-55-09 | EVQLLESGGGLVQPGGSLRLSCAASGFAFRSYAMGWVRQAPGKG |
| | | LEWVSTISGGGGNTYYADSVKGRFTISRDNSKNTLYLQMNSLRAE |
| | | DTAVYYCARGYGGYGYWGQGTLVTVSS |
| 27 | TIGIT-55-10 | EVQLLESGGGLVQPGGSLRLSCAASGFTFSKSAMSWVRQAPGKGL |
| | | EWVSAISGSGGLTYYADSVKGRFTISRDNSKNTLYLQMNSLRAED |
| | | TAVYYCAKAGDYDYYFDYWGQGTLVTVSS |
| 28 | TIGIT-55-11 | EVQLLESGGGLVQPGGSLRLSCAASGFTFTNYGMSWVRQAPGKGL |
| | | EWVSSISGSGSTTYYADSVKGRFTISRDNSKNTLYLQMNSLRAEDT |
| | | AVYYCASVKRWGYYFNWWGQGTLVTVSS |
| 29 | TIGIT-55-12 | EVQLLESGGGLVQPGGSLRLSCAASGFTLSSYAMAWVRQAPGKGL |
| | | EWVSTLSGSGGSTYYADSVKGRFTISRDNSKNTLYLQMNSLRAED |
| | | TAVYYCARVRVGAYDAFDIWGQGTLVTVSS |
| 30 | TIGIT-55-13 | EVQLLESGGGLVQPGGSLRLSCAASGFTFSTYGMNWVRQAPGKGL |
| | | EWVSTISGSGGSTYFADSVKGRFTISRDNSKNTLYLQMNSLRAEDT |
| | | AVYYCARNSGWFMPFDYWGQGTLVTVSS |
| 31 | TIGIT-55-14 | EVQLLESGGGLVQPGGSLRLSCAASGFMFSRYAMSWVRQAPGKG |
| | | LEWVSSISGSGGTTYYADSVKGRFTISRDNSKNTLYLQMNSLRAED |
| | | TAVYYCARRGSGWYIDSWGQGTLVTVSS |
| 32 | TIGIT-55-15 | EVQLLESGGGLVQPGGSLRLSCAASGFTFSDYAMGWVRQAPGKG |
| | | LEWVSTISGSGSRTYYADSVKGRFTISRDNSKNTLYLQMNSLRAED |
| | | TAVYYCARREGDYMGPNWFDPWGQGTLVTVSS |
| 33 | TIGIT-55-16 | EVQLLESGGGLVQPGGSLRLSCAASGFAFSSYAMGWVRQAPGKGL |
| | | EWVSAITSSGGGTYYADSVKGRFTISRDNSKNTLYLQMNSLRAED |
| | | TAVYYCASIRERRFDFWGQGTLVTVSS |
| 34 | TIGIT-55-17 | EVQLLESGGGLVQPGGSLRLSCAASGFTFSNHAMAWVRQAPGKG |
| | | LEWVSGISGSGGYTYYADSVKGRFTISRDNSKNTLYLQMNSLRAE |
| | | DTAVYYCARHSLTPYNFWSGYYSRSFDIWGQGTLVTVSS |
| 35 | TIGIT-29-7 | EVQLVESGGGLVQAGGSLRLSCAASGSIFSNYAMGWFRQAPGKER |
| | | EFVATISRGGTRTNYADSVKGRFTISADNAKNTVYLQMNSLKPEDT |
| | | AVYYCAAAAWTIYAYNYWGQGTQVTVSS |
| 36 | TIGIT-29-10 | EVQLVESGGGLVQAGGSLRLSCAASGRTFSNYGMGWFRQAPGKE |
| | | REFVSGISGSGGRTSYADSVKGRFTISADNAKNTVYLQMNSLKPED |
| | | TAVYYCAANLWYPVDRLNTGFNYWGQGTQVTVSS |
| 37 | TIGIT-30-30 | EVQLVESGGGLVQAGGSLRLSCAASGGTFSGRGMGWFRQAPGKE |
| | | REWVSSVYIFGGSTYYADSVKGRFTISADNAKNTVYLQMNSLKPE |
| | | DTAVYYCANSNKPKFDWGQGTQVTVSS |
| 38 | TIGIT-30-43 | EVQLVESGGGLVQAGGSLRLSCAASGFTFSTSWMGWFRQAPGKE |
| | | RELVAARNSGGNTNYADSVKGRFTISADNAKNTVYLQMNSLKPE |
| | | DTAVYYCAADVWYGSTWRNWGQGTQVTVSS |
| 39 | TIGIT-31-1 | EVQLVESGGGLVQPGGSLRLSCAASGFTFDRSWMGWFRQAPGKE |
| | | REVVASITSGGSTYYADSVKGRFTISADNSKNTAYLQMNSLKPEDT |
| | | AVYYCAADVWYGSTWRNWGQGTLVTVSS |
| 40 | TIGIT-31-6 | EVQLVESGGGLVQPGGSLRLSCAASGFTFSTSWMGWFRQAPGKER |
| | | ELVASITSGGSTYYADSVKGRFTISADNSKNTAYLQMNSLKPEDTA |
| | | VYYCAADVWYGSTWRNWGQGTLVTVSS |
| 41 | TIGIT-31-8 | EVQLVESGGGLVQPGGSLRLSCAASGFTFSTSWMGWFRQAPGKER |
| | | ELVAARNSGGNTNYADSVKGRFTISADNSKNTAYLQMNSLKPEDT |
| | | AVYYCAADVWYGSTWRNWGQGTLVTVSS |
| 42 | TIGIT-31-26 | EVQLVESGGGLVQPGGSLRLSCAASGFTFDRSWMGWFRQAPGKE |
| | | RELVAAITSGGSTYYADSVKGRFTISADNSKNTAYLQMNSLKPEDT |
| | | AVYYCAADVWYGSTWRNWGQGTLVTVSS |
| 43 | TIGIT-31-32 | EVQLVESGGGLVQPGGSLRLSCAASGFTFSTSWMGWFRQAPGKER |
| | | ELVAAMTSGGGTNYADSVKGRFTISADNSKNTAYLQMNSLKPEDT |
| | | AVYYCAADVWYGSTWRNWGQGTLVTVSS |
| 44 | TIGIT-31-56 | EVQLVESGGGLVQPGGSLRLSCAASGRIFRRNSMGWFRQAPGKER |
| | | EFVAVITRSGGGEVTTYADSVKGRFTINADNSKNTAYLQMNSLKP |
| | | EDTAVYYCAMSSVTRGSSDWGQGTLVTVST |

Variable Domain of Light Chain

| | | |
|---|---|---|
| 45 | TIGIT-55-01 | DIQMTQSPSSLSASVGDRVTITCRASQAISNYLNWYQQKPGKAPKL |
| | | LIYAASRLQSGVPSRFSGSGSGTDFTLTISSLQPEDFATYYCQESYST |
| | | PFTFGGGTKVEIK |
| 46 | TIGIT-55-02 | DIQMTQSPSSLSASVGDRVTITCRASQYISTYLNWYQQKPGKAPKL |
| | | LIYAASSLQGGVPSRFSGSGSGTDFTLTISSLQPEDFATYYCQQNYIT |
| | | PLTFGGGTKVEIK |
| 47 | TIGIT-55-03 | DIQMTQSPSSLSASVGDRVTITCRASQYISSYLNWYQQKPGKAPKL |
| | | LIYGAFSLQSGVPSRFSGSGSGTDFTLTISSLQPEDFATYYCQQSYIT |
| | | PYTFGGGTKVEIK |
| 48 | TIGIT-55-04 | DIQMTQSPSSLSASVGDRVTITCRASQTIITYLNWYQQKPGKAPKLL |
| | | IYAASNLRSGVPSRFSGSGSGTDFTLTISSLQPEDFATYYCQQSYSLP |
| | | WTFGGGTKVEIK |
| 49 | TIGIT-55-05 | DIQMTQSPSSLSASVGDRVTITCRASQSVRSYLNWYQQKPGKAPKL |
| | | LIYTATSLESGVPSRFSGSGSGTDFTLTISSLQPEDFATYYCQQSYGL |
| | | PRTFGGGTKVEIK |
| 50 | TIGIT-55-06 | DIQMTQSPSSLSASVGDRVTITCRASQSISKYLNWYQQKPGKAPKL |
| | | LIYGASSLRGGVPSRFSGSGSGTDFTLTISSLQPEDFATYYCQQSYRP |
| | | PLTFGGGTKVEIK |
| 51 | TIGIT-55-07 | DIQMTQSPSSLSASVGDRVTITCRASQNIKTYLNWYQQKPGKAPKL |
| | | LIYAASSLHTGVPSRFSGSGSGTDFTLTISSLQPEDFATYYCQQTYSI |
| | | PQTFGGGTKVEIK |
| 52 | TIGIT-55-08 | DIQMTQSPSSLSASVGDRVTITCRAGQSIRSYLNWYQQKPGKAPKL |
| | | LIYASSNLQSGVPSRFSGSGSGTDFTLTISSLQPEDFATYYCQQSYST |
| | | PLLTFGGGTKVEIK |
| 53 | TIGIT-55-09 | DIQMTQSPSSLSASVGDRVTITCRASQSIRRYLNWYQQKPGKAPKL |
| | | LIYAASTLQIGVPSRFSGSGSGTDFTLTISSLQPEDFATYYCQQTYSS |
| | | PYTFGGGTKVEIK |
| 54 | TIGIT-55-10 | DIQMTQSPSSLSASVGDRVTITCRTSQSIRRYLNWYQQKPGKAPKL |
| | | LIYRASRLQSGVPSRFSGSGSGTDFTLTISSLQPEDFATYYCQQSYN |
| | | TLRTFGGGTKVEIK |
| 55 | TIGIT-55-11 | DIQMTQSPSSLSASVGDRVTITCRASQNINYYLNWYQQKPGKAPKL |
| | | LIYGASSLQNGVPSRFSGSGSGTDFTLTISSLQPEDFATYYCQQSYIT |
| | | PYTGGGTKVEIK |
| 56 | TIGIT-55-12 | DIQMTQSPYSLSASVGDRVTITCRASQSIRRYLNWYQQKPGKAPKL |
| | | LIYRASTLQTGVPSRFSGSGSGTDFTLTISSLQPEDFATYYCQQTYSS |
| | | PFTFGGGTKVEIK |
| 57 | TIGIT-55-13 | DIQMTQSPSSLSASVGDRVTITCRTSQSISTYLNWYQQKPGKAPKLL |
| | | IYATSRLQSGVPSRFSGSGSGTDFTLTISSLQPEDFATYYCQQSYTTP |
| | | LTFGGGTKVEIK |
| 58 | TIGIT-55-14 | DIQMTQSPSSLSASVGDRVTITCRASQSVSRYLNWYQQKPGKAPKL |
| | | LIYGSSNLQSGVPSRFSGSGSGTDFTLTISSLQPEDFATYYCQESYST |
| | | PFTFGGGTKVEIK |
| 59 | TIGIT-55-15 | DIQMTQSPSSLSASVGDRVTITCRASQAISRNLNWYQQKPGKAPKL |
| | | LIYGASNLQTGVPSRFSGSGSGTDFTLTISSLQPEDFATYYCQQSHS |
| | | TPVTFGGGTKVEIK |
| 60 | TIGIT-55-16 | DIQMTQSPSSLSASVGDRVTITCRASQRISTYLNWYQQKPGKAPKL |
| | | LIYGTSSLQSGVPSRFSGSGSGTDFTLTISSLQPEDFATYYCQQSYIIP |
| | | WTFGGGTKVEIK |
| 61 | TIGIT-55-17 | DIQMTQSPSSLSASVGDRVTITCRASQSISSYVNWYQQKPGKAPKL |
| | | LIYGASRLQDGVPSRFSGSGSGTDFTLTISSLQPEDFATYYCQQSYIT |
| | | PYTFGGGTKVEIK |

TABLE 12
Variable Domain of Heavy Chain CDR Sequences

| | SEQ | | SEQ | | SEQ | |
|---|---|---|---|---|---|---|
| | ID | | ID | | ID | |
| Variant | NO | CDR1 | NO | CDR2 | NO | CDR3 |
| TIGIT-29-01 | 62 | RTFSNYAMG | 360 | AAITWSGTRTDYA | 658 | CAAAAWTIYEYDYW |
| TIGIT-29-02 | 63 | RTFDIYAMG | 361 | STISWSGGRTYYA | 659 | CAARPVYRTYGSW |
| TIGIT-29-03 | 64 | FTFSSYAMG | 362 | AAITWSGTRTDYA | 660 | CAAAAWRYSEYDYW |
| TIGIT-29-4 | 65 | STFDTYVMG | 363 | STISSDGDSTYYA | 661 | CAAGTRRGRNYW |
| TIGIT-29-5 | 66 | RTFSIYAMG | 364 | ATISSSGDRTYYA | 662 | CAARRYGRRYDYW |
| TIGIT-29-06 | 67 | GTFRSYVMG | 365 | ATINSSGSRTYYA | 663 | CAARPNYRDYEYW |
| TIGIT-29-07 | 68 | SIFSNYAMG | 366 | ATISRGGTRTNYA | 664 | CAAAAWTIYAYNYW |
| TIGIT-29-8 | 69 | RTLDDYVMG | 367 | ATISGGGDTTYYA | 665 | CAAVPWRWTTRRDYW |
| TIGIT-29-9 | 70 | FTFDNYAMG | 368 | SSITWSGGRTSYA | 666 | CAANAWTIYRYDYW |
| TIGIT-29-10 | 71 | RTFSNYGMG | 369 | SGISGSGGRTSYA | 667 | CAANLWYPVDRLNTGENYW |
| TIGIT-29-11 | 72 | RTLSSYAMG | 370 | ASITWGGGRTYYA | 668 | CATRLWGTWTAGDYDYW |
| TIGIT-29-12 | 73 | STFSSYAMG | 371 | AAITWSGTRTNYA | 669 | CAAAAWTIYTYDSW |
| TIGIT-29-13 | 74 | FIFSNYAMG | 372 | AAITWSGGRTYYA | 670 | CAAAAWTIYEYDYW |
| TIGIT-29-14 | 75 | FTFSDYVMG | 373 | SAISWSGTNTNYA | 671 | CATRALRDGRGYW |
| TIGIT-29-15 | 76 | RTFDSYAMG | 374 | ATISGSGGRTYYA | 672 | CAAAAWTIYEFDSW |
| TIGIT-29-16 | 77 | SIFSIYAMG | 375 | ATISWGGNSTYYA | 673 | CAARPRFRTYGYW |
| TIGIT-29-17 | 78 | STLSIYAMG | 376 | ATISSGGGSTYYA | 674 | CAAGSVYGRNYW |
| TIGIT-29-18 | 79 | STFSNYAMG | 377 | SAINSSGSRTYYA | 675 | CAARLWGTWTAGDYDYW |
| TIGIT-29-19 | 80 | RTFSSYAMG | 378 | ATISGSFGRTYYA | 676 | CAAGAWTIYEYDYW |
| TIGIT-29-20 | 81 | STFSIYAMG | 379 | ASISWSGDTTNYA | 677 | CAAGSVYGRNSW |
| TIGIT-29-21 | 82 | STFSNYAMG | 380 | SAITWSSSRTYYA | 678 | CAAAAWTIYNFEYW |
| TIGIT-29-22 | 83 | SILSSYTMG | 381 | STISRSSTRTYYA | 679 | CAARLWGTWTAGDYDYW |
| TIGIT-29-23 | 84 | STFDIYAMG | 382 | ASISSGDTNTNYA | 680 | CAAGRYSGYNSW |
| TIGIT-29-24 | 85 | RTFDTYAMG | 383 | SAISTGDGSTNYA | 681 | CAAARRSGRGSW |
| TIGIT-29-25 | 86 | FTFDNYAMG | 384 | AAITWSGGRTYYA | 682 | CAAAAWTIYEYDSW |
| TIGIT-29-26 | 87 | FTFDNYAMG | 385 | ATITWSGTRTNYA | 683 | CAAAAWTIYDYDYW |
| TIGIT-29-27 | 88 | RTFSNNVMG | 386 | AAISWGGASTNYA | 684 | CAAGPKTPDTRNYW |
| TIGIT-29-28 | 89 | FIFDSYAMG | 387 | AAISWGGSNTNYA | 685 | CAAVRITDGRDYW |
| TIGIT-29-29 | 90 | RTFSNYAMG | 388 | AAITWSGTRTDYA | 686 | CAAAAWTIYEYDYW |
| TIGIT-29-30 | 91 | FTFSSYAMG | 389 | AAITWSGTRTDYA | 687 | CAAAAWRYSEYDYW |
| TIGIT-29-31 | 92 | FTFSIYAMG | 390 | STISWSGGNTYYA | 688 | CATRPRFRRYDSW |
| TIGIT-29-32 | 93 | STFDSYAMG | 391 | AAITTSGSSTYYA | 689 | CAARGGVRSGSPGTYNYW |
| TIGIT-29-33 | 94 | FIFSTYAMG | 392 | SAITRSGITTYYA | 690 | CAAAAWTIYEYDYW |
| TIGIT-29-34 | 95 | FTFRNYAMG | 393 | SSISSSSSRTSYA | 691 | CAARLWGTWTAGDYDYW |
| TIGIT-29-35 | 96 | RIFSIYTMG | 394 | ATINSSGSRTYYA | 692 | CAARPSYNRYDSW |
| TIGIT-29-36 | 97 | FTFSSY AMG | 395 | ASITWSGTSTNYA | 693 | CAAAAWTIYAYDYW |
| TIGIT-29-37 | 98 | RTFSNYAMG | 396 | AGISWSGTRTYYA | 694 | CAAAAWTIYEYDYW |
| TIGIT-29-38 | 99 | STFSSYAMG | 397 | SAISRNGASTSYA | 695 | CAAAGTRFDYW |
| TIGIT-29-39 | 100 | RTLDDYVMG | 398 | ATISGGGDTTYYA | 696 | CAAVPWRWTTRRDYW |
| TIGIT-29-40 | 101 | FTFDNYAMG | 399 | ATITWSGTRTNYA | 697 | CAAAAWTIYDYDYW |
| TIGIT-29-41 | 102 | RTFSTNAMG | 400 | TAITTSGGNTYYA | 698 | CAARDETYGTYDYW |
| TIGIT-29-42 | 103 | STFSTYAMG | 401 | ATISTSSSRTYYA | 699 | CAARLWGTWTAGDYDYW |
| TIGIT-29-43 | 104 | RTFDSYAMG | 402 | SAISWSGSSTYYA | 700 | CAARGGYGRYDSW |
| TIGIT-29-44 | 105 | FTFDNYAMG | 403 | ATITWSGTTTNYA | 701 | CAAAAWTIYDYDYW |
| TIGIT-29-45 | 106 | FTFSSYAMG | 404 | ASITWSGTRTDYA | 702 | CAAAAWTIYGYEYW |
| TIGIT-29-46 | 107 | STFDIYAMG | 405 | ASISSGDTNTYYA | 703 | CAAGRYSGYNSW |
| TIGIT-29-47 | 108 | STLSSYAMG | 406 | AAITGSGGRTYYA | 704 | CAANRRYSFPYWSFWYDDFDYW |
| TIGIT-30-01 | 109 | FAFSSYWMG | 407 | AARNSGGNTNYA | 705 | CAADVWYGSTWRNW |
| TIGIT-30-02 | 110 | RTFGDYIMG | 408 | ATISGGGSTNYA | 706 | CAAVFSRGPLTW |
| TIGIT-30-03 | 111 | NIFSRYIMG | 409 | AGISNGGTTKYA | 707 | CAQGWKIRPTIW |
| TIGIT-30-04 | 112 | FTFSTHWMG | 410 | AARNSGGNTNYA | 708 | CAADVWYGSTWRNW |
| TIGIT-30-5 | 113 | GTFRNYGMG | 411 | AAISWSGVSTIYA | 709 | CASSPYGPLYRSTHYYDW |
| TIGIT-30-6 | 114 | RFSRINSMG | 412 | AHIFRSGITSYASYA | 710 | CAIGRGSW |
| TIGIT-30-7 | 115 | IPASIRTMG | 413 | SLITSDDGSTYYA | 711 | CAWTTNRGMDW |
| TIGIT-30-8 | 116 | FTMSSSWMG | 414 | ATLTSGGSTNYA | 712 | CAADVWYGSTWRNW |
| TIGIT-30-9 | 117 | PISGINRMG | 415 | STITFNGDHTYYA | 713 | CAARPYTRPGSMWVSSLYDW |
| TIGIT-30-10 | 118 | RTFSLSDMG | 416 | GAINWLSESTYYA | 714 | CAAQGGVLSGWDW |
| TIGIT-30-11 | 119 | SITSIRSMG | 417 | SSVYIFGGSTYYA | 715 | CANSNKPKFDW |
| TIGIT-30-12 | 120 | RTFGDYIMG | 418 | ASVSGGGNSDYA | 716 | CAAVFSRGPLTW |
| TIGIT-30-13 | 121 | RTFSNYFMG | 419 | AAINWDSARTYYA | 717 | CASAGRW |
| TIGIT-30-14 | 122 | PTFSIYDMG | 420 | AAITWNSGRTNYA | 718 | CAAGAWSSLRKTAASW |
| TIGIT-30-15 | 123 | FTFSGNWMG | 421 | SGISSGGGRTYYA | 719 | CAADVWYGSTWRNW |
| TIGIT-30-16 | 124 | FPFSEYPMG | 422 | AVVNWNGDSTYYA | 720 | CANFNRDW |
| TIGIT-30-17 | 125 | SIFNIGMG | 423 | SSIYSNGHTYYA | 721 | CANSNKPKFDW |
| TIGIT-30-18 | 126 | RAFSLRTMG | 424 | SLITSDDGSTYYA | 722 | CAWTTNRGMDW |
| TIGIT-30-19 | 127 | RTFSSYAMMG | 425 | AIITDGSKTLYA | 723 | CAAQFTLARHLVW |
| TIGIT-30-20 | 128 | PTFSIYDMG | 426 | AVINWSRGSTFYA | 724 | CAAGVWSSLRHTAANW |
| TIGIT-30-21 | 129 | FTFSTSWMG | 427 | ATINSGGGTNYA | 725 | CAADVWYGSTWRNW |
| TIGIT-30-22 | 130 | FTLSGNWMG | 428 | ASISSSGVSKHYA | 726 | CAADVWYGSTWRNW |
| TIGIT-30-23 | 131 | RAFRRYTMG | 429 | AAIRWSGGTTFYA | 727 | CAAEWAAMKDW |
| TIGIT-30-24 | 132 | NIFSRYIMG | 430 | AGISNGGTTKYA | 728 | CAQGWKIIPTDW |
| TIGIT-30-25 | 133 | PTFSIYDMG | 431 | ASTIWSRGDTYYA | 729 | CAAGVWSSLRHTAANW |
| TIGIT-30-26 | 134 | RTYYAMG | 432 | AIITDGSKTLYA | 730 | CAAQFTLARHLVW |
| TIGIT-30-27 | 135 | FTFSTSWMG | 433 | AGILSDGRELYA | 731 | CAADVWYGSTWRNW |
| TIGIT-30-28 | 136 | RTFESYRMG | 434 | GGINWSGRTYYA | 732 | CAARRLYSGSYLDW |
| TIGIT-30-29 | 137 | SSLSFNAMG | 435 | SSVYIFGGSTYYA | 733 | CANSNKPKFDW |
| TIGIT-30-30 | 138 | GTFSGRGMG | 436 | SSVYIFGGSTYYA | 734 | CANSNKPKFDW |
| TIGIT-30-31 | 139 | PTFSWTMMG | 437 | AIITDGSKTLYA | 735 | CAAQFTLARHLVW |
| TIGIT-30-32 | 140 | IIGTIRTMG | 438 | SLITSDDGSTYYA | 736 | CAWTTNRGMDW |
| TIGIT-30-33 | 141 | FTLENNMMG | 439 | SAIGWSGASTYYA | 737 | CAANLRGDNW |
| TIGIT-30-34 | 142 | NIFSRYIMG | 440 | AGISSGGTTKYA | 738 | CAQGWKIVPTNW |
| TIGIT-30-35 | 143 | NIDRLYAMG | 441 | SLITSDDGSTYYA | 739 | CASSGPADARNGERWAW |
| TIGIT-30-36 | 144 | SIASIHAIG | 442 | SSVYIFGGSTYYA | 740 | CANSNKPKFDW |
| TIGIT-30-37 | 145 | RTFSSKAMG | 443 | SSVYIFGGSTYYA | 741 | CANSNKPKFDW |
| TIGIT-30-38 | 146 | SIASFNAMG | 444 | SSVYIFGGSTYYA | 742 | CANSNKPKFDW |
| TIGIT-30-39 | 147 | FTFSTSWMG | 445 | VGISSGGSTHYA | 743 | CAADVWYGSTWRNW |
| TIGIT-30-40 | 148 | FTFSGNWMG | 446 | VGISSGGSTHYA | 744 | CAADVWYGSTWRNW |
| TIGIT-30-41 | 149 | RTFSSYAMMG | 447 | AIITDGSKTLYA | 745 | CAAQFILARHLVW |
| TIGIT-30-42 | 150 | ITITTEVMG | 448 | AAIHWNGDSTAYA | 746 | CAQVSQWRAW |
| TIGIT-30-43 | 151 | FTFSTSWMG | 449 | AARNSGGNTNYA | 747 | CAADVWYGSTWRNW |
| TIGIT-30-44 | 152 | VTLDLYAMG | 450 | AGIWRSGGSTVYA | 748 | CATWTTTWGRNRDW |
| TIGIT-30-45 | 153 | GTFSGGFMG | 451 | ASVLRGGYTWYA | 749 | CANGGSSYW |
| TIGIT-30-46 | 154 | RTFSTYASMW | 452 | AIITDGSKTLYA | 750 | CAGSWSYPGLTW |
| TIGIT-30-47 | 155 | FTMSSSWMG | 453 | VGISSGGSTHYA | 751 | CAADVWYGSTWRNW |
| TIGIT-30-48 | 156 | FPVNRYSMG | 454 | SAIGWSGASTYYA | 752 | CAADFWLARLRVADDYDW |
| TIGIT-30-49 | 157 | NIFSRYIMG | 455 | AGISNGGTTKYA | 753 | CAQGWKIVPTNW |
| TIGIT-30-50 | 158 | RSFSNYVMG | 456 | ATITSGGLTVYA | 754 | CALYRVNW |
| TIGIT-30-51 | 159 | SIFSISDMG | 457 | GAINWLSESTYYA | 755 | CAAQGGVLSGWDW |
| TIGIT-30-52 | 160 | RTFSNYFMG | 458 | ATVTWRDNITYYA | 756 | CASAGRW |
| TIGIT-30-53 | 161 | LTFSNYVMG | 459 | AAINWDSARTYYA | 757 | CASAGRW |
| TIGIT-30-54 | 162 | FTFRSFGMG | 460 | ASTIWSRGDTYYA | 758 | CASSPYGPLYRSTHYYDW |
| TIGIT-30-55 | 163 | NTFSGGFMG | 461 | ASVLRGGYTWYA | 759 | CATGWQSTTKSQGW |
| TIGIT-30-56 | 164 | LTISTYPMG | 462 | AAVNWSGRRELYA | 760 | CAAFREYHW |
| TIGIT-30-57 | 165 | PTFSIYDMG | 463 | AAITWNSGRIGYA | 761 | CAAGVWSSLRHTAANW |
| TIGIT-30-58 | 166 | FAFGDSWMG | 464 | SGISSGGGRTYYA | 762 | CAADVWYGSTWRNW |
| TIGIT-31-01 | 167 | FTFDRSWMG | 465 | ASITSGGSTYYA | 763 | CAADVWYGSTWRNW |
| TIGIT-31-02 | 168 | RTFGDYIMG | 466 | AEITRSGRTNYA | 764 | CAAVFSRGPLTW |
| TIGIT-31-03 | 169 | FTFSGNWMG | 467 | ASISSSGISTYYA | 765 | CAADVWYGSTWRNW |
| TIGIT-31-04 | 170 | FPVNRYWMG | 468 | ATITSGGSTNYA | 766 | CAADVWYGSTWRNW |
| TIGIT-31-05 | 171 | RTFGDYIMG | 469 | ATISRGGGSTYV | 767 | CAAVFSRGPLTW |
| TIGIT-31-06 | 172 | FTFSTSWMG | 470 | ASITSGGSTYYA | 768 | CAADVWYGSTWRNW |
| TIGIT-31-7 | 173 | STFSINRMG | 471 | ATIVHSGGHSGGT | 769 | CAARPYTRPGSMWVSSLYDW |
| | | | | SYYA | | |
| TIGIT-31-08 | 174 | FTFSTSWMG | 472 | AARNSGGNTNYA | 770 | CAADVWYGSTWRNW |
| TIGIT-31-9 | 175 | GTLSGNAMG | 473 | ASIYWSSGNTYYA | 771 | CANSNKPKFDW |
| TIGIT-31-10 | 176 | HTFSSYGMG | 474 | AAISWSGISTIYA | 772 | CASSPYGPLYRSTHYYDW |
| TIGIT-31-11 | 177 | FTFSTSWMG | 475 | ASISTSGNTFYA | 773 | CAADVWYGSTWRNW |
| TIGIT-31-12 | 178 | FTFSRYWMG | 476 | ASITSGGSTYYA | 774 | CAADVWYGSTWRNW |
| TIGIT-31-13 | 179 | FTFDRSWMG | 477 | ASITSGGTTNYA | 775 | CAADVWYGSTWRNW |
| TIGIT-31-14 | 180 | YTFRAYVMG | 478 | AVINYRGSSLKYA | 776 | CAASEWGGSDYDHDYDW |
| TIGIT-31-15 | 181 | FTFSTYGMG | 479 | AAISWSGVSKHYA | 777 | CASSPYGPLYRSTHYYDW |
| TIGIT-31-16 | 182 | FTFSTSWMG | 480 | VSVTSGGYTNYA | 778 | CAADVWYGSTWRNW |
| TIGIT-31-17 | 183 | FTMSSSWMG | 481 | ASINSGGTRNYA | 779 | CAADVWYGSTWRNW |
| TIGIT-31-18 | 184 | FTFSGNWMG | 482 | ASISSGSAINYA | 780 | CAADVWYGSTWRNW |
| TIGIT-31-19 | 185 | RTFGNYAMG | 483 | ADIRSSAGRTYYA | 781 | CAASEWGGSDYDHDYDW |
| TIGIT-31-20 | 186 | FTFSGNWMG | 484 | AGILSDGRELYA | 782 | CAADVWYGSTWRNW |
| TIGIT-31-21 | 187 | FTLSGNWMG | 485 | ASISSSGISTYYA | 783 | CAADVWYGSTWRNW |
| TIGIT-31-22 | 188 | RTFSTHAMG | 486 | AAITPINWGGRGTHYA | 784 | CAAKRLRSGRWTW |
| TIGIT-31-23 | 189 | FTFSNSGMG | 487 | ASIYWSSGNTYYA | 785 | CANSNKPKFDW |
| TIGIT-31-24 | 190 | RTFSMG | 488 | ATVRWGTSSTYYA | 786 | CAAETFGSGSSLMSEYDW |
| TIGIT-31-25 | 191 | NIFSRYIMG | 489 | AGISNGGTTKYA | 787 | CAQGWKIVPTNW |
| TIGIT-31-26 | 192 | FTFDRSWMG | 490 | AAITSGGSTYYA | 788 | CAADVWYGSTWRNW |
| TIGIT-31-27 | 193 | FTFGHYAMG | 491 | AAISWSGVSTYYA | 789 | CASSPYGPLYRSTHYYDW |
| TIGIT-31-28 | 194 | RTFSSYHMG | 492 | ALISRVGVTSYA | 790 | CAAVRTYGSATYDW |
| TIGIT-31-29 | 195 | RSRMG | 493 | ATISWSGSAVYA | 791 | CAAGGRYSARVW |
| TIGIT-31-30 | 196 | RTYNMG | 494 | ATIYSRSGGSTTYYA | 792 | CATYGYDSGRYYSW |
| TIGIT-31-31 | 197 | FTLSGNWMG | 495 | ASISSGGGTNYA | 793 | CAADVWYGSTWRNW |
| TIGIT-31-32 | 198 | FTFSTSWMG | 496 | AAMTSGGGTNYA | 794 | CAADVWYGSTWRNW |
| TIGIT-31-33 | 199 | FTFSTSWMG | 497 | ASITSGGSTNYA | 795 | CAADVWYGSTWRNW |
| TIGIT-31-34 | 200 | RSRYGMG | 498 | SAISWSGISTYYA | 796 | CAATQWGSSGWKQARWYDW |
| TIGIT-31-35 | 201 | FTFSTSWMG | 499 | ASITSGGTTNYA | 797 | CAADVWYGSTWRNW |
| TIGIT-31-36 | 202 | FTFDRSWMG | 500 | ASVTSGGTTNYA | 798 | CAADVWYGSTWRNW |
| TIGIT-31-37 | 203 | SIFSINSMG | 501 | AALSWIIGSTYYA | 799 | CAVNGRWRSWSSQRDW |
| TIGIT-31-38 | 204 | FTFDRSWMG | 502 | ASITSGGSTSYA | 800 | CAADVWYGSTWRNW |
| TIGIT-31-39 | 205 | FTFSTSWMG | 503 | AGVNSNGYINYA | 801 | CAADVWYGSTWRNW |
| TIGIT-31-40 | 206 | STLRDYVMG | 504 | SSISRSGTTMFA | 802 | CAAVFSRGLLTC |
| TIGIT-31-41 | 207 | GTLSSYIMG | 505 | AAISGWSGGTTNYA | 803 | CAAARFAPGSRGYDW |
| TIGIT-31-42 | 208 | FTFSTHWMG | 506 | ASIGSSGTTRYA | 804 | CAADVWYGSTWRNW |
| TIGIT-31-43 | 209 | GTFSAFPMG | 507 | AAISSGGTTYYA | 805 | CAAQGGVLSAW |
| TIGIT-31-44 | 210 | FTFSGNWMG | 508 | ASISSGGTTNYA | 806 | CAADVWYGSTWRNW |
| TIGIT-31-45 | 211 | FTFSGNWMG | 509 | AGVNSNGYINYA | 807 | CAADVWYGSTWRNW |
| TIGIT-31-46 | 212 | FTFDRSWMG | 510 | ASITSGGTTSYA | 808 | CAADVWYGSTWRNW |
| TIGIT-31-47 | 213 | FTFSGNWMG | 511 | VGISSGGTPHYA | 809 | CAADVWYGSTWRNW |
| TIGIT-31-48 | 214 | FTLSSNWMG | 512 | AGVNSNGYINYA | 810 | CAADVWYGSTWRNW |
| TIGIT-31-49 | 215 | FDFSVSWMG | 513 | ARISSGGELPYYA | 811 | CAARPNTRPGSMW |
| TIGIT-31-50 | 216 | FTMSSSWMG | 514 | GGISSGGSTYYA | 812 | CAADVWYGSTWRNW |
| TIGIT-31-51 | 217 | RNFRRNSMG | 515 | AVITRSGGGEVTTYA | 813 | CAMSSVTRGSSDW |
| TIGIT-31-52 | 218 | FTFDRSWMG | 516 | AGITSSGIPNYA | 814 | CAADVWYGSTWRNW |
| TIGIT-31-53 | 219 | LTISTYNMG | 517 | SAIGWSGASTYYA | 815 | CAAFRGRMYDW |
| TIGIT-31-54 | 220 | FTFSTSWMG | 518 | AAVTSGGNTNYA | 816 | CAADVWYGSTWRNW |
| TIGIT-31-55 | 221 | RTFGDYIMG | 519 | AEITRVGNTNYA | 817 | CAAVFSRGPLTW |
| TIGIT-31-56 | 222 | RIFRRNSMG | 520 | AVITRSGGGEVTTYA | 818 | CAMSSVTRGSSDW |
| TIGIT-211-1 | 223 | FTFGNYGVA | 521 | SYICRAGGPTYYA | 819 | CARSWPYFFYCW |
| TIGIT-211-2 | 224 | FTFDKYRMM | 522 | GVIWGGGGTYYA | 820 | CARIFSYALDYW |
| TIGIT-211-3 | 225 | FTFPSYTMG | 523 | STIWPRGHKTYYA | 821 | CAKDQWPFDYW |
| TIGIT-211-4 | 226 | FTFSNYGVS | 524 | SGISSGGDTYYV | 822 | CAKYTGRWEPYDYW |
| TIGIT-211-5 | 227 | FTFNNFSMT | 525 | SSISPSGGWTEYA | 823 | CAKAFSTEDYW |
| TIGIT-211-6 | 228 | FTFSAYGMN | 526 | SGISPNGGITTYA | 824 | CASLSRGYW |
| TIGIT-211-7 | 229 | FTFSDYTMN | 527 | SSIDWHGGVTYYA | 825 | CARSYGGGFDYW |
| TIGIT-211-8 | 230 | FTFNNYGMS | 528 | TGISSGGDTYYV | 826 | CAKYTGRWEPYDYW |
| TIGIT-211-9 | 231 | FTFNKYPMM | 529 | SGITRSGSTNYR | 827 | CAKKLSNGFDYW |
| TIGIT-211-10 | 232 | FTFNSYAMS | 530 | SGIVSSGGLTGYA | 828 | CAKGWFGGFNYW |
| TIGIT-211-11 | 233 | FTFGNYKMT | 531 | SQISQTGRITYYA | 829 | CARSSFYYYALDYW |
| TIGIT-211-12 | 234 | FTFTNYGVS | 532 | SGISSGGDTYYV | 830 | CAKYTGRWEPYDYW |
| TIGIT-211-13 | 235 | FTFNKYPMM | 533 | SYISSSGSSTYYA | 831 | CARVIAAAGAFDYW |
| TIGIT-211-14 | 236 | FTFADEGMM | 534 | SSIGRHGGRTYYA | 832 | CAKSGRRFDYW |
| TIGIT-211-15 | 237 | FTFSSAAMS | 535 | SGISPSGGITTYA | 833 | CASLSRGYW |
| TIGIT-211-16 | 238 | FTFDRYRMM | 536 | SAISGSGDKTYYA | 834 | CAKKLSNGFDYW |
| TIGIT-211-17 | 239 | FTFAEYSMN | 537 | SWISPHGALTYYA | 835 | CARSYGGGFDYW |
| TIGIT-211-18 | 240 | FTFGTIPMS | 538 | GVIWGGGGTYYA | 836 | CAKAHGNPVSDLSFDYW |
| TIGIT-211-19 | 241 | FTFLYYRMA | 539 | TAISRSGDKTYYA | 837 | CAKWFSRNFDYC |
| TIGIT-211-20 | 242 | FTFTNYGVS | 540 | GYINPSGGYTYYA | 838 | CARSYGGGFDYW |
| TIGIT-211-21 | 243 | FTFSNYGVS | 541 | GYINPSRGYTYYA | 839 | CARSYGGGFDYW |
| TIGIT-211-22 | 244 | FTFEGYPMS | 542 | SSISGYGSTTYYA | 840 | CAKSSFDKYNFDYW |
| TIGIT-211-23 | 245 | FTFSRYFMG | 543 | SSISSTGFKTYYA | 841 | CARGGRLYDILTGQGAPFDYW |
| TIGIT-211-24 | 246 | FTFNNYGVS | 544 | TWISPHGALTYYA | 842 | CAKGRRRFDYW |
| TIGIT-211-25 | 247 | FTFGTIPMS | 545 | SVIHQSGTPTYYA | 843 | CARGPYGRYAALDYW |
| TIGIT-211-26 | 248 | FTFGNYRMT | 546 | SQISETGRRTYYA | 844 | CARSSFYYYALDYW |
| TIGIT-211-27 | 249 | FTFVWYGMG | 547 | SAISGRGDNSYYA | 845 | CAKAGPRGFDYW |
| TIGIT-211-28 | 250 | FTFSTYAMS | 548 | SEISPSGGYTYYA | 846 | CAKVKLGGGPNFDYW |
| TIGIT-211-29 | 251 | FTFSYYRMY | 549 | SGISPSGGITTYA | 847 | CAKGNSRYVFDYW |
| TIGIT-211-30 | 252 | FTFKSYGMH | 550 | SAISGSGGGTSYA | 848 | CARAGQWLGDFDYW |
| TIGIT-211-31 | 253 | FTFVAYNMG | 551 | SAISREGRATYYA | 849 | CAKSGTRIKQGFDYW |
| TIGIT-211-32 | 254 | FTFEQYDMR | 552 | SYITPKGDHTYYA | 850 | CAKDRIPNLHFDYW |
| TIGIT-211-33 | 255 | FTFNKYPMM | 553 | SAISGSGGGTSYA | 851 | CARGGYYYALDYW |
| TIGIT-211-34 | 256 | FTFSVYSMN | 554 | SGISPSGGITTYA | 852 | CAKIRNLHWDVGRQFDYW |
| TIGIT-211-35 | 257 | FTFNAYPMT | 555 | SAITGSGGSTYYA | 853 | CARDGSYSSSWYGYW |
| TIGIT-211-36 | 258 | FTFSNYGMT | 556 | GVIWGGGGTYYA | 854 | CAKHWNRFDYW |
| TIGIT-211-37 | 259 | FTFPVYNMA | 557 | SSISGYGSTTYYA | 855 | CARDAYLHFDYW |
| TIGIT-211-38 | 260 | FTFSPYLVS | 558 | SSISDHGENTYYA | 856 | CAKSPLVRNNGQFDYW |
| TIGIT-211-39 | 261 | FTFKSYVMG | 559 | SAINGSGGGTYYA | 857 | CARGGSWEEDFDYW |
| TIGIT-211-40 | 262 | FTFSRYAMN | 560 | SEISPSGKKKYYA | 858 | CAKSSFDKYNFDYW |
| TIGIT-211-41 | 263 | FTFNKYPMM | 561 | SSIVSSGGLTLYA | 859 | CAKGGGLPYLSFDYW |
| TIGIT-211-42 | 264 | FTFNHYGMG | 562 | SYISSSGSSTYYA | 860 | CAKGWLGNFDYW |
| TIGIT-211-43 | 265 | FTFYDYTMD | 563 | SAISGSGGGTSYA | 861 | CARRHWPGGFDYW |
| TIGIT-211-44 | 266 | FTFGNYAMA | 564 | SSIGRHGGRTYYA | 862 | CARDTYLHFDYW |
| TIGIT-211-45 | 267 | FTFRRYVMG | 565 | SEISPSGGYTYYA | 863 | CAKRWTFNTAFDYW |
| TIGIT-211-46 | 268 | FTFSSYFMS | 566 | TTIGPNGTTTYYA | 864 | CAREWQHGPVAYW |
| TIGIT-211-47 | 269 | FMFSWYDMG | 567 | SQISNTGDRRYYA | 865 | CAKSPSSLLATYFDYW |
| TIGIT-211-48 | 270 | FTFTNYGMS | 568 | CGIYPNGGSTYYA | 866 | CARAGGGGFDYC |
| TIGIT-211-49 | 271 | FTFPNYGMS | 569 | GYINPTGGYTYYA | 867 | CARSYGGGFDYW |
| TIGIT-211-50 | 272 | FTFPNYGMA | 570 | SGIYPSGGSTLYA | 868 | CAKAYYGGFDYW |
| TIGIT-211-51 | 273 | FTFHKYGMA | 571 | STISSGGGYTYYP | 869 | CARDTYLHFDYW |
| TIGIT-211-52 | 274 | FTFSRYHMG | 572 | STISPYGPVTYYA | 870 | CARVWRNHLDYW |
| TIGIT-211-53 | 275 | STFTEYRMW | 573 | SGISPSGGITTYA | 871 | CARVWRNSLDYW |
| TIGIT-211-54 | 276 | FTFEDTEMD | 574 | SKIGPHGRLTYYA | 872 | CARAPRGYSYGYYYW |
| TIGIT-211-55 | 277 | FTFGSSAMS | 575 | SAISGGGSNKYYA | 873 | CAKSGRRFDYW |
| TIGIT-211-56 | 278 | FTFSTAAMT | 576 | SGISPTGGITTYA | 874 | CASLSRGYC |
| TIGIT-211-57 | 279 | LTFPNYGMG | 577 | SAISREGRATYYA | 875 | CARVIAAAGAFDYW |
| TIGIT-211-58 | 280 | FTFLWYDMG | 578 | SAISGRGDNTYYA | 876 | CAKAVPKGFDYW |
| TIGIT-211-59 | 281 | FTFSPYLMA | 579 | SSISAPGFTTYYA | 877 | CARSPLVHYNRGFQYC |
| TIGIT-211-60 | 282 | FTFSDYTMN | 580 | SGISPSGGITYYA | 878 | CAKQAPGEKWLARGRLDYW |
| TIGIT-211-61 | 283 | FTFSNYGVS | 581 | SYINPSGGYTYYA | 879 | CARSYGGGFDYW |
| TIGIT-211-62 | 284 | FTFYKYLMS | 582 | SAISGNGGSTFYA | 880 | CAKGTRTFDYW |
| TIGIT-211-63 | 285 | FTFSAYPMY | 583 | SSITSTGDQTYYA | 881 | CARVITPLDILTYW |
| TIGIT-211-64 | 286 | FTLADYTMN | 584 | TWITPSGGLTYYA | 882 | CARSYGGGFDYW |
| TIGIT-211-65 | 287 | FTFSYYGMY | 585 | SPITNAGDRPYYA | 883 | CARHGAGYFGWYNDCC |
| TIGIT-211-66 | 288 | FTFVWYDMG | 586 | SSIPSSGENTYYA | 884 | CAKSSLPSGQGHFDYW |
| TIGIT-211-67 | 289 | FTFNKYPMM | 587 | SAITGSGGGTSYA | 885 | CARGGYYYALDYW |
| TIGIT-211-68 | 290 | FTFSSASMS | 588 | SGISPTGGITTYA | 886 | CANLSPGYW |
| TIGIT-211-69 | 291 | FTFGNYRMT | 589 | GVIWGGGGTYYA | 887 | CARIFSYALDYW |
| TIGIT-211-70 | 292 | FTFSSYFMS | 590 | GVIWGGGGTYYA | 888 | CPKGGTSFDYW |
| TIGIT-211-71 | 293 | FTFSTAAMS | 591 | SAISPRGGITTYA | 889 | CARLSRGYW |
| TIGIT-211-72 | 294 | FTFRSYTMG | 592 | SSIWPRGQKTYYA | 890 | CAKGFRLFPRTFDYW |
| TIGIT-211-73 | 295 | FTFGTYYMG | 593 | SSISSSGGYTGYA | 891 | CAKGFRLFPRTFDYW |
| TIGIT-211-74 | 296 | FTFSSYVMI | 594 | SGINRTGGVTSYA | 892 | CAKVASDRSVLYDYW |
| TIGIT-211-75 | 297 | FTFGTIPMS | 595 | SSIGPHGGKTYYA | 893 | CAKVRPFWGTFDYW |
| TIGIT-211-76 | 298 | FTFSYYRVY | 596 | SGISPSGGITTYA | 894 | CAKGNSRYVFDYW |
| TIGIT-211-77 | 299 | FTFGNYAMA | 597 | SSIWPSGGQTWYA | 895 | CAKGGTSFDYW |
| TIGIT-211-78 | 300 | FTFTNYGVS | 598 | GYINPNGGYTYYA | 896 | CARSYGGGFDYW |
| TIGIT-211-79 | 301 | FTFSNYGVS | 599 | SYISHGGGDTYYA | 897 | CARSGPYYFDYW |
| TIGIT-211-80 | 302 | FAFAAYDMG | 600 | SYITPKGDHTYYA | 898 | CAKSSFDKYNFDYW |
| TIGIT-211-81 | 303 | FTLSSYPMS | 601 | SAITREGRATYYA | 899 | CARDTYLHFDYW |
| TIGIT-211-82 | 304 | FTFTYYRMD | 602 | SIITPSGGITYYA | 900 | CAKGNSRYMFDYW |
| TIGIT-211-83 | 305 | FTFADEGMM | 603 | SLIPHTGNPTYYA | 901 | CATAESYKGYDYW |
| TIGIT-211-84 | 306 | FTFKDYGVN | 604 | RVIWGGGDTYYV | 902 | CAKYTGRWEPYDYW |
| TIGIT-211-85 | 307 | FTFSRYAMT | 605 | GVIWGGGNTTYY | 903 | CAKGGTRFDYW |
| TIGIT-211-86 | 308 | FTFSSYFMS | 606 | GVIWGGGGTYYA | 904 | CAKGGTSFDYW |
| TIGIT-211-87 | 309 | FTFNKYPMM | 607 | STISHGGEHTYYA | 905 | CAKKLSNGFDYW |
| TIGIT-211-88 | 310 | FTFSNYGMS | 608 | SSIVSSGGLTLYA | 906 | CAKVWRNHLDYW |
| TIGIT-211-89 | 311 | FTFSNYGVS | 609 | GYINPSRGNTYYA | 907 | CARSYRGGFDYW |
| TIGIT-211-90 | 312 | FIFSSAAMS | 610 | SAISGRGDNTYYA | 908 | CARVWRNHLDYW |
| TIGIT-211-91 | 313 | FTFSYYRMY | 611 | SAITGTGGETYYA | 909 | CARVIAAAGAFDYW |
| TIGIT-211-92 | 314 | FTFSRYFMG | 612 | TSISSTGENTYYA | 910 | CARGGRLYDILTGQGAPFDYW |
| TIGIT-211-93 | 315 | FTFSRYFMG | 613 | SEISPSGKKKYYA | 911 | CAKSSFDKYNFDYW |
| TIGIT-211-94 | 316 | FTFSYYRMY | 614 | SGISPTGCITYYA | 912 | CAKGHSLCVFYYW |
| TIGIT-211-95 | 317 | FTFPKYGMA | 615 | STISSGGGYTYYP | 913 | CARDTYLHFDYW |
| TIGIT-211-96 | 318 | FTFKDYGMN | 616 | SEISPSGGYTYYA | 914 | CARGSYIIWSALDYW |
| TIGIT-211-97 | 319 | FTFNAYPMT | 617 | SAITGSGGSTYYA | 915 | CARVWRNHLDYW |
| TIGIT-211-98 | 320 | FTFETYAMS | 618 | SVISGSGGRPNYA | 916 | CAREGLWAFDYW |
| TIGIT-211-99 | 321 | FTFSPYPMM | 619 | SAITGTGGETYYA | 917 | CAKWSSRAFDYW |
| TIGIT-211-100 | 322 | FTFSTYPVS | 620 | SGISSGGDTYYV | 918 | CAKYTGRWEPYDYW |
| TIGIT-211-101 | 323 | FTFGNYAMS | 621 | SGISPSGGHTWYA | 919 | CAKGGTSYDYW |
| TIGIT-211-102 | 324 | FTFTYYRMY | 622 | SGISPSGGITTYA | 920 | CAKGNSRYVFDYW |
| TIGIT-211-103 | 325 | FTFTSYDMG | 623 | SAIVSSGSLTLYA | 921 | CARRHWPGGFDYW |
| TIGIT-211-104 | 326 | FTFSPRRMS | 624 | SGISPSGGITTYA | 922 | CARHNRAIGTEDYW |
| TIGIT-211-105 | 327 | FTFGNYRMT | 625 | SSINRHGWVTYY | 923 | CARSVLLDYW |
| | | | | A | | |
| TIGIT-211-106 | 328 | FTFGNYGMT | 626 | SYINRNGGITYYA | 924 | CARSDRVGFCCW |
| TIGIT-211-107 | 329 | FTFSPYPMM | 627 | SAIIGTGSNTYYA | 925 | CAKVRTFRLNYC |
| TIGIT-211-108 | 330 | FTFSSYFVT | 628 | GVIWGGGDTYYV | 926 | CAKYTGRWEPYDYW |
| TIGIT-211-109 | 331 | FTFSDYTMN | 629 | SGISPSGGITTYA | 927 | CAKQAPGEKWLARGRLHYW |
| TIGIT-211-110 | 332 | FTFFPYAMG | 630 | SSIDDRGRYTYYA | 928 | CAKVRPFWGTFDYW |
| TIGIT-211-111 | 333 | FTFVWYDMG | 631 | SAISGRGDNTYYA | 929 | CAKAVPKGFDYW |
| TIGIT-211-112 | 334 | FTFSSYFMT | 632 | SSISSTGCNTYYA | 930 | CAKTPRKFDYW |
| TIGIT-211-113 | 335 | LIFAWYDMG | 633 | STIGSSGYPTYYA | 931 | CAKAVPKGFDYW |
| TIGIT-211-114 | 336 | FTFEGYPMS | 634 | STISSGGGYTYYP | 932 | CAKQAPGEKWLARGRLDYW |
| TIGIT-211-115 | 337 | FTFSNYGVS | 635 | GYINPSGGYTYYA | 933 | CARSYGGGFDYW |
| TIGIT-211-116 | 338 | FTFSRYFMG | 636 | SAISGSGGNTYYA | 934 | CARVWRNHLDYW |
| TIGIT-269-1 | 339 | GIFSSYAIS | 637 | GGIIPTNYA | 935 | CARWRGGLSAFDVW |
| TIGIT-269-2 | 340 | GTYTTHGIS | 638 | GGIIPINYA | 936 | CARAFGLASGKGPGVFDYW |
| TIGIT-269-3 | 341 | FSFGSYAMS | 639 | SAITGSYYA | 937 | CARVLGNSGRGLDYW |
| TIGIT-269-4 | 342 | GPFNKYAIS | 640 | GGIIPMNYA | 938 | CARGSHQLYYAFEYW |
| TIGIT-269-5 | 343 | FTFSTYLMI | 641 | SAISGSYYA | 939 | CARDVEGQVGHFFDPW |
| TIGIT-269-6 | 344 | FTLSSYSMS | 642 | SAINPSYYA | 940 | CAKGIKAFGGTRLPLYFDSW |
| TIGIT-269-7 | 345 | FTFGNYAMS | 643 | SAITGSYYA | 941 | CAKHLLSRSRGLDVW |
| TIGIT-269-8 | 346 | FTFGTYSMS | 644 | SAITGSYYA | 942 | CAKHLLARSGGMHLW |
| TIGIT-269-9 | 347 | FSFSNHAMS | 645 | SAISGSYYA | 943 | CARSTRDRAFDYW |
| TIGIT-269-10 | 348 | FSFSSSGMS | 646 | SAISGSYYA | 944 | CVKVGDYFAFDHW |
| TIGIT-269-11 | 349 | GTFRRHAIS | 647 | GGIIPMNYA | 945 | CARGTALVRRAFDIW |
| TIGIT-269-12 | 350 | GTYTTHGIS | 648 | GGIIPINYA | 946 | CARAFGLASGKGPGVFDYW |
| TIGIT-269-13 | 351 | FTFSNYAMS | 649 | SAISGGYYA | 947 | CAKHRVGARAFDVW |
| TIGIT-269-14 | 352 | FTFSNYAMS | 650 | SAISGNYYA | 948 | CAKHRVGARAFDVW |
| TIGIT-269-15 | 353 | GTFNIYAIS | 651 | GGIIPINYA | 949 | CARHPRDFGIHGLDVW |
| TIGIT-269-16 | 354 | GTFSRYGIS | 652 | GGIIPINYA | 950 | CARVRGGYYYDTW |
| TIGIT-269-17 | 355 | GTFTNHAIS | 653 | GGINPLNYA | 951 | CATGGGHFRSGRDVW |
| TIGIT-269-18 | 356 | FTFASYAMS | 654 | SAITNSYYA | 952 | CARHLRLGRGFDSW |
| TIGIT-269-19 | 357 | GTFTYYPIS | 655 | GGIIPFNYA | 953 | CATPSGGIGRRLDVW |
| TIGIT-269-20 | 358 | GTYTTHGIS | 656 | GGIIPINYA | 954 | CAKAFGLASGKGPGVFDYW |
| TIGIT-269-21 | 359 | GTFSQYAIS | 657 | GGIIPMNYA | 955 | CARESRTLFGVPNAFDIW |
| TIGIT-471-001 | 1847 | FTFSNYGVS | 1896 | GYINPSRGYTYYA | 1945 | CARSYGGGFDYW |
| TIGIT-471-009 | 1848 | FTFVRYDMA | 1897 | STISSGGDYTYYP | 1946 | CAKDTYNHFDYW |
| TIGIT-471-017 | 1849 | FTFSKYGMS | 1898 | SYINSSRGYTYYA | 1947 | CARSSGGGFDYW |
| TIGIT-471-025 | 1850 | FTFSRYFMG | 1899 | SEISPSGKKKYYA | 1948 | CAKSSFDKYNFDYW |
| TIGIT-471-033 | 1851 | FTFHKYGMT | 1900 | SAISSGGGYTYYP | 1949 | CARDTYLHFDYW |
| TIGIT-471-041 | 1852 | FTFSRYVMG | 1901 | SEISPSGKKKYYA | 1950 | CAKSSFDKYNFDYW |
| TIGIT-471-049 | 1853 | FTFSTYAMN | 1902 | TEISPSGKKKYYA | 1951 | CAKSSFDKYNFDYW |
| TIGIT-471-005 | 1854 | CTFSSYLMS | 1903 | GVIWGGGGTYYA | 1952 | CAKGGTSFDYW |
| TIGIT-471-013 | 1855 | FTFNAYPMT | 1904 | SGITGSGGSTYYA | 1953 | CARDGSYSSSWYGYW |
| TIGIT-471-021 | 1856 | FTFHKYGMA | 1905 | STISSGGGYTYYP | 1954 | CARDTYLHFEYW |
| TIGIT-471-029 | 1857 | FTFHKYGMA | 1906 | STISSGGGYTYYP | 1955 | CARDTYLHFDYW |
| TIGIT-471-037 | 1858 | FTFSPYSMS | 1907 | SEISPSGKKKYYA | 1956 | CARSSFDKYNFDYW |
| TIGIT-471-045 | 1859 | FTFSRYFMG | 1908 | SEISPSGKKKYYA | 1957 | CAKSSFDKYNFDYW |
| TIGIT-471-002 | 1860 | FTFSSYFMS | 1909 | GVIWGGGGTYYA | 1958 | CAKGGTSFDYW |
| TIGIT-471-010 | 1861 | FTFSRYIMG | 1910 | SEISLIGKKKYYA | 1959 | CAKSSFDKYNFDYW |
| TIGIT-471-018 | 1862 | FTFSNYGVS | 1911 | GYINRSREYTYYA | 1960 | CARSYGGGFDYW |
| TIGIT-471-026 | 1863 | FTFSRYAMN | 1912 | SEISPSGKKKYYA | 1961 | CAKSSFDKYNFDYW |
| TIGIT-471-034 | 1864 | FTFSRYFMG | 1913 | SEISPSGKKKYYA | 1962 | CAKSSFDKYNFDYW |
| TIGIT-471-042 | 1865 | FTFHKYGMA | 1914 | STISGGGGYTYYP | 1963 | CARDTYLHFDYW |
| TIGIT-471-006 | 1866 | FTFSKYGVS | 1915 | CYINSGSGYTYYA | 1964 | CARASYVHFDYW |
| TIGIT-471-014 | 1867 | FTFSSYFMS | 1916 | GVIWGGGGTYYA | 1965 | CAKGGTSFDYW |
| TIGIT-471-022 | 1868 | FTFSSYLMS | 1917 | GVIWGGGGTYYA | 1966 | CAKGGTSFDYW |
| TIGIT-471-030 | 1869 | FTFSRYVMN | 1918 | SEISPSGKKKYYA | 1967 | CAKSSFDKYNFDYW |
| TIGIT-471-038 | 1870 | FTFSNYGVS | 1919 | GYINPSRGYTYYA | 1968 | CARSYGGGFDYW |
| TIGIT-471-046 | 1871 | FTFEDETMS | 1920 | SAISGSGGGTSYA | 1969 | CARDVIAGPFDYW |
| TIGIT-471-003 | 1872 | FTFSNYGVS | 1921 | SWISPHGALTYYA | 1970 | CAKGRRRFDYW |
| TIGIT-471-011 | 1873 | FTFSNYGVS | 1922 | SSIDWHGWVTYYA | 1971 | CVKNALRFDYW |
| TIGIT-471-019 | 1874 | FTFSNYGVS | 1923 | VYINPSRGYTYYA | 1972 | CARSYGGGFDYW |
| TIGIT-471-027 | 1875 | FTFSNYGVS | 1924 | SWISPHGALTYYA | 1973 | CAKGRRRFDYW |
| TIGIT-471-035 | 1876 | FTFNAYPMT | 1925 | SAITGSGGSTYYA | 1974 | CARVWRNHLDYW |
| TIGIT-471-043 | 1877 | FTFEHNDMH | 1926 | SGISPSGGITTYA | 1975 | CAKQAPGEKWLARGRLDYW |
| TIGIT-471-007 | 1878 | LHSRSYVMG | 1927 | SEISRSGKKKYYA | 1976 | CAKSSFGEYNFDYW |
| TIGIT-471-015 | 1879 | FTFDKYDMA | 1928 | STICSGGDYTYYP | 1977 | CARDTYIHFDYW |
| TIGIT-471-023 | 1880 | FTFNKYPMM | 1929 | STIGPSGTSTYYA | 1978 | CARRSYFRRFDYW |
| TIGIT-471-031 | 1881 | FTFSRYAMN | 1930 | SEISPSGKKKYYA | 1979 | CAKSSFDKYNFDYW |
| TIGIT-471-039 | 1882 | FTFNADPMS | 1931 | SAITGSGGSTYYA | 1980 | CARDGSYSSSWYGYW |
| TIGIT-471-047 | 1883 | FTFEVYTMA | 1932 | SSIHPKGYPTRYA | 1981 | CAKGWFGNFDYW |
| TIGIT-471-004 | 1884 | FTFHKYGMT | 1933 | SSISSGGGYTYYP | 1982 | CARDTYLHFDYW |
| TIGIT-471-012 | 1885 | FTFNKYPMM | 1934 | SGITRSGSTNYR | 1983 | CAKKLSNGFDYW |
| TIGIT-471-020 | 1886 | SSVSRYVMG | 1935 | SEISRIGKKKCYA | 1984 | CEKSSFDKYNFDYW |
| TIGIT-471-028 | 1887 | FTFPVYNMA | 1936 | SGIYPSGGSTVYA | 1985 | CARHRAGSSGWYSDYW |
| TIGIT-471-036 | 1888 | FTFSSYFMS | 1937 | GVIWGGGGTYYA | 1986 | CAKGGTSFDYW |
| TIGIT-471-044 | 1889 | FTFSRYFMG | 1938 | SEISPSGKKKYYA | 1987 | CAKSSFDKYNFHYW |
| TIGIT-471-008 | 1890 | FTFEPVIMG | 1939 | SSISPNGWDTYYA | 1988 | CATETSPNDYW |
| TIGIT-471-016 | 1891 | FTFHKYGMA | 1940 | STISSGGGYTYYP | 1989 | CARDTYLHFDYW |
| TIGIT-471-024 | 1892 | FTFEPVIMG | 1941 | SSISPNGWDTYYA | 1990 | CATETSPNDYW |
| TIGIT-471-032 | 1893 | FTFHKYGMA | 1942 | STISSGGGYTYYP | 1991 | CARDTYLHFDYW |
| TIGIT-471-040 | 1894 | FTFHKYGMA | 1943 | STISSGGGYTYYP | 1992 | CARDTYLHFDYW |
| TIGIT-471-048 | 1895 | FTFSNYGVS | 1944 | GYINPSRGYTYYA | 1993 | CARSYGGGFDYW |

TABLE 13
Variable Domain of Light Chain CDR Sequences

| | SEQ | | SEQ | | SEQ | |
|---|---|---|---|---|---|---|
| | ID | | ID | | ID | |
| Variant | NO | CDR1 | NO | CDR2 | NO | CDR3 |
| TIGIT-211-1 | 956 | RSSQSLVHSTGNTYLH | 1093 | AASDLES | 1230 | CQQGHTLPWTF |
| TIGIT-211-2 | 957 | RTSQDIGNYLN | 1094 | PKHNRPP | 1231 | CQQSYNSPWTF |
| TIGIT-211-3 | 958 | RSSQSLVHSTGNTYLH | 1095 | AASDLES | 1232 | CQQGHTLPWTF |
| TIGIT-211-4 | 959 | RSSQSLVHSTGNTYLH | 1096 | AASDLES | 1233 | CQQGHTLPWTF |
| TIGIT-211-5 | 960 | RSSQSLVHSTGNTYLH | 1097 | AASDLES | 1234 | CQQGHTLPWTF |
| TIGIT-211-6 | 961 | RSSQSLVHSTGNTYLH | 1098 | AASDLES | 1235 | CQQGHTLPWTF |
| TIGIT-211-7 | 962 | SGDKLRNKYAS | 1099 | GQHNRPS | 1236 | CQGSYYSGSGWYYAF |
| TIGIT-211-8 | 963 | RSSQSLVHSTGNTYLH | 1100 | AASDLES | 1237 | CQQGHTLPWTF |
| TIGIT-211-9 | 964 | RSSQSLVHSTGNTYLH | 1101 | AASDLES | 1238 | CQQGHTLPWTF |
| TIGIT-211- | 965 | RSSQSLVHSTGNTYLH | 1102 | AASDLES | 1239 | CQQGHTLPWTF |
| 10 | | | | | | |
| TIGIT-211- | 966 | RSSQSLVHSTGNTYLH | 1103 | AASDLES | 1240 | CQQGHTLPWTF |
| 11 | | | | | | |
| TIGIT-211- | 967 | SGDKLGHTYTS | 1104 | YTSSLHS | 1241 | CATRAVRGNPHVLF |
| 12 | | | | | | |
| TIGIT-211- | 968 | RASQSIREYLH | 1105 | FGSELRK | 1242 | CGQGVLWPATF |
| 13 | | | | | | |
| TIGIT-211- | 969 | SGDTLGGKYAW | 1106 | QNDKRPS | 1243 | CHOWSSYPTF |
| 14 | | | | | | |
| TIGIT-211- | 970 | QSSQSVYSNNELS | 1107 | GTSYRYS | 1244 | CSSWAGSRSGTVF |
| 15 | | | | | | |
| TIGIT-211- | 971 | SGDKLGHTYTS | 1108 | RTSWLQS | 1245 | CQQYHSYPPTF |
| 16 | | | | | | |
| TIGIT-211- | 972 | RASQTIERRLN | 1109 | QNDKRPS | 1246 | CQQSYSIPPTF |
| 17 | | | | | | |
| TIGIT-211- | 973 | SGDKLGDKYTS | 1110 | HTSRLQD | 1247 | CQQSYNLPLTF |
| 18 | | | | | | |
| TIGIT-211- | 974 | RSSQSLVHSTGNTYLH | 1111 | AASDLES | 1248 | CQQGHTLPWTF |
| 19 | | | | | | |
| TIGIT-211- | 975 | RSSQSLVHSTGNTYLH | 1112 | AASDLES | 1249 | CQQGHTLPWTF |
| 20 | | | | | | |
| TIGIT-211- | 976 | RSSQSLVHSTGNTYLH | 1113 | AASDLES | 1250 | CQQGHTLPWTF |
| 21 | | | | | | |
| TIGIT-211- | 977 | RASQGVRTSLA | 1114 | AKNNRPS | 1251 | CQQSYHTPQTF |
| 22 | | | | | | |
| TIGIT-211- | 978 | RSSQSLVHSTGNTYLH | 1115 | AASDLES | 1252 | CQQGHTLPWTF |
| 23 | | | | | | |
| TIGIT-211- | 979 | RSSQSLVHSTGNTYLH | 1116 | AASDLES | 1253 | CQQGHTLPWTF |
| 24 | | | | | | |
| TIGIT-211- | 980 | RASQTIERRLN | 1117 | AKNNRPS | 1254 | CQQTALVPYTF |
| 25 | | | | | | |
| TIGIT-211- | 981 | RASQTIGDYLN | 1118 | GASSRAT | 1255 | CAQGAALPRTF |
| 26 | | | | | | |
| TIGIT-211- | 982 | RSSQSLVHSTGNTYLH | 1119 | AASDLES | 1256 | CQQGHTLPWTF |
| 27 | | | | | | |
| TIGIT-211- | 983 | QGASLRNYYAS | 1120 | DTSKVAS | 1257 | CFQGSHIPYTF |
| 28 | | | | | | |
| TIGIT-211- | 984 | RASQSISNNLN | 1121 | AKNNRPS | 1258 | CQQSYTTPPTF |
| 29 | | | | | | |
| TIGIT-211- | 985 | RASQPIGPDLL | 1122 | RKSNRPS | 1259 | CQQSYSTPYTF |
| 30 | | | | | | |
| TIGIT-211- | 986 | RASQSIRRFLN | 1123 | WASDRES | 1260 | CQQTATWPFTF |
| 31 | | | | | | |
| TIGIT-211- | 987 | RSSQSLVHSTGNTYLH | 1124 | AASDLES | 1261 | CQQGHTLPWTF |
| 32 | | | | | | |
| TIGIT-211- | 988 | RSSQSLVHSTGNTYLH | 1125 | AASDLES | 1262 | CQQGHTLPWTF |
| 33 | | | | | | |
| TIGIT-211- | 989 | RANQNIGNFLN | 1126 | QDFKRPS | 1263 | CHQRSSYPWTF |
| 34 | | | | | | |
| TIGIT-211- | 990 | SGNKLGDKYAS | 1127 | RTSWLQS | 1264 | CVARAVRGNPHVLF |
| 35 | | | | | | |
| TIGIT-211- | 991 | RSSQSLVHSTGNTYLH | 1128 | AASDLES | 1265 | CQQGHTLPWTF |
| 36 | | | | | | |
| TIGIT-211- | 992 | RSSQSLVHSTGNTYLH | 1129 | AASDLES | 1266 | CQQGHTLPWTF |
| 37 | | | | | | |
| TIGIT-211- | 993 | RSSQSLVHSTGNTYLH | 1130 | AASDLES | 1267 | CQQGHTLPWTF |
| 38 | | | | | | |
| TIGIT-211- | 994 | RSSQSLVHSTGNTYLH | 1131 | AASDLES | 1268 | CQQGHTLPWTF |
| 39 | | | | | | |
| TIGIT-211- | 995 | RASQDIGNFLN | 1132 | RTSWLQS | 1269 | CQQRSSYPPTF |
| 40 | | | | | | |
| TIGIT-211- | 996 | RSSQSLVHSTGNTYLH | 1133 | AASDLES | 1270 | CQQGHTLPWTF |
| 41 | | | | | | |
| TIGIT-211- | 997 | RASQGVRTSLA | 1134 | GKNIRPS | 1271 | CQQSYSFPLTF |
| 42 | | | | | | |
| TIGIT-211- | 998 | RASQSIRRYLN | 1135 | WASDRES | 1272 | CQQSFSTPLTF |
| 43 | | | | | | |
| TIGIT-211- | 999 | RSSQSLVHSTGNTYLH | 1136 | AASDLES | 1273 | CQQGHTLPWTF |
| 44 | | | | | | |
| TIGIT-211- | 1000 | RASQSIRRYLN | 1137 | DASNLOS | 1274 | CQQSYDFPRTF |
| 45 | | | | | | |
| TIGIT-211- | 1001 | RSSQSLVHSTGNTYLH | 1138 | AASDLES | 1275 | CQQGHTLPWTF |
| 46 | | | | | | |
| TIGIT-211- | 1002 | RSSQSLVHSTGNTYLH | 1139 | AASDLES | 1276 | CQQGHTLPWTF |
| 47 | | | | | | |
| TIGIT-211- | 1003 | RSSQSLVHSTGNTYLH | 1140 | AASDLES | 1277 | CQQGHTLPWTF |
| 48 | | | | | | |
| TIGIT-211- | 1004 | RSSQSLVHSTGNTYLH | 1141 | AASDLES | 1278 | CQQGHTLPWTF |
| 49 | | | | | | |
| TIGIT-211- | 1005 | RSSQSLVHSTGNTYLH | 1142 | AASDLES | 1279 | CQQGHTLPWTF |
| 50 | | | | | | |
| TIGIT-211- | 1006 | RASQGVRTSLA | 1143 | AKNNRPS | 1280 | CQQSYSAPYTF |
| 51 | | | | | | |
| TIGIT-211- | 1007 | RSSQSLVHSTGNTYLH | 1144 | AASDLES | 1281 | CQQGHTLPWTF |
| 52 | | | | | | |
| TIGIT-211- | 1008 | RASQTIGDYLN | 1145 | GQHNRPS | 1282 | CQQSFSIPWTF |
| 53 | | | | | | |
| TIGIT-211- | 1009 | KASDHIGKFLT | 1146 | AASKLAS | 1283 | CQQVVWRPFTF |
| 54 | | | | | | |
| TIGIT-211- | 1010 | RASQTIGDYLN | 1147 | HDNKRPS | 1284 | CQQDAFHPPTF |
| 55 | | | | | | |
| TIGIT-211- | 1011 | RSSQSLVHSTGNTYLH | 1148 | AASDLES | 1285 | CQQGHTLPWTF |
| 56 | | | | | | |
| TIGIT-211- | 1012 | RSSQSLVHSTGNTYLH | 1149 | GKNIRPS | 1286 | CQQSYTTPWTF |
| 57 | | | | | | |
| TIGIT-211- | 1013 | RSSQSLVHSTGNTYLH | 1150 | AASDLES | 1287 | CQQGHTLPWTF |
| 58 | | | | | | |
| TIGIT-211- | 1014 | RSSQSLVHSTGNTYLH | 1151 | AASDLES | 1288 | CQQGHTLPWTF |
| 59 | | | | | | |
| TIGIT-211- | 1015 | RSSQSLVHSTGNTYLH | 1152 | AASDLES | 1289 | CQQGHTLPWTF |
| 60 | | | | | | |
| TIGIT-211- | 1016 | RSSQSLVHSTGNTYLH | 1153 | AASDLES | 1290 | CQQGHTLPWTF |
| 61 | | | | | | |
| TIGIT-211- | 1017 | RSSQSLVHSTGNTYLH | 1154 | AASDLES | 1291 | CQQGHTLPWTF |
| 62 | | | | | | |
| TIGIT-211- | 1018 | RSSQSLVHSTGNTYLH | 1155 | AASDLES | 1292 | CQQGHTLPWTF |
| 63 | | | | | | |
| TIGIT-211- | 1019 | RSSQSLVHSTGNTYLH | 1156 | AASDLES | 1293 | CQQGHTLPWTF |
| 64 | | | | | | |
| TIGIT-211- | 1020 | RSSQSLVHSTGNTYLH | 1157 | AASDLES | 1294 | CQQGHTLPWTF |
| 65 | | | | | | |
| TIGIT-211- | 1021 | RSSQSLVHSTGNTYLH | 1158 | AASDLES | 1295 | CQQGHTLPWTF |
| 66 | | | | | | |
| TIGIT-211- | 1022 | RSSQSLVHSTGNTYLH | 1159 | AASDLES | 1296 | CQQGHTLPWTF |
| 67 | | | | | | |
| TIGIT-211- | 1023 | RSSQSLVHSTGNTYLH | 1160 | AASDLES | 1297 | CQQGHTLPWTF |
| 68 | | | | | | |
| TIGIT-211- | 1024 | RASQNIRSYLN | 1161 | GASTLOS | 1298 | CQQSYENPLTF |
| 69 | | | | | | |
| TIGIT-211- | 1025 | RSSQSLVHSTGNTYLH | 1162 | AASDLES | 1299 | CQQGHTLPWTF |
| 70 | | | | | | |
| TIGIT-211- | 1026 | RSSQSLVHSTGNTYLH | 1163 | AASDLES | 1300 | CQQGHTLPWTF |
| 71 | | | | | | |
| TIGIT-211- | 1027 | RASHNINSYLN | 1164 | GKNIRPS | 1301 | CQQSYIIPPTF |
| 72 | | | | | | |
| TIGIT-211- | 1028 | RSSQSLVHSTGNTYLH | 1165 | AASDLES | 1302 | CQQGHTLPWTF |
| 73 | | | | | | |
| TIGIT-211- | 1029 | RSSQSLVHSTGNTYLH | 1166 | AASDLES | 1303 | CQQGHTLPWTF |
| 74 | | | | | | |
| TIGIT-211- | 1030 | RSSQSLVHSTGNTYLH | 1167 | AASDLES | 1304 | CQQGHTLPWTF |
| 75 | | | | | | |
| TIGIT-211- | 1031 | RSSQSLVHSTGNTYLH | 1168 | AASDLES | 1305 | CQQGHTLPWTF |
| 76 | | | | | | |
| TIGIT-211- | 1032 | RASQSVRSYLN | 1169 | AASSLYS | 1306 | CQQYASVPVTF |
| 77 | | | | | | |
| TIGIT-211- | 1033 | RSSQSLVHSTGNTYLH | 1170 | AASDLES | 1307 | CQQGHTLPWTF |
| 78 | | | | | | |
| TIGIT-211- | 1034 | RASQSVRSYLN | 1171 | AATTLOS | 1308 | CQQSYIIPPTF |
| 79 | | | | | | |
| TIGIT-211- | 1035 | RASQGVRTSLA | 1172 | GKNIRPS | 1309 | CQQGYRWPVTF |
| 80 | | | | | | |
| TIGIT-211- | 1036 | RSSQSLVHSTGNTYLH | 1173 | AASDLES | 1310 | CQQGHTLPWTF |
| 81 | | | | | | |
| TIGIT-211- | 1037 | RSSQSLVHSTGNTYLH | 1174 | AASDLES | 1311 | CQQGHTLPWTF |
| 82 | | | | | | |
| TIGIT-211- | 1038 | SGDKLGDKYTS | 1175 | GASSRAT | 1312 | CMSRSIWGNPHVLF |
| 83 | | | | | | |
| TIGIT-211- | 1039 | SGDKLGHTYTS | 1176 | YTSSLHS | 1313 | CATRAVRGNPHVLF |
| 84 | | | | | | |
| TIGIT-211- | 1040 | RSSQSLVHSTGNTYLH | 1177 | AASDLES | 1314 | CQQGHTLPWTF |
| 85 | | | | | | |
| TIGIT-211- | 1041 | RSSQSLVHSTGNTYLH | 1178 | AASDLES | 1315 | CQQGHTLPWTF |
| 86 | | | | | | |
| TIGIT-211- | 1042 | RASQTIGDYLN | 1179 | QDFKRPS | 1316 | CQQYHDFPLTF |
| 87 | | | | | | |
| TIGIT-211- | 1043 | RSSQSLVHSTGNTYLH | 1180 | AASDLES | 1317 | CQQGHTLPWTF |
| 88 | | | | | | |
| TIGIT-211- | 1044 | RSSQSLVHSTGNTYLH | 1181 | AASDLES | 1318 | CQQGHTLPWTF |
| 89 | | | | | | |
| TIGIT-211- | 1045 | SGDRLGEKYVS | 1182 | GTTSLES | 1319 | CQQGYTLPWTF |
| 90 | | | | | | |
| TIGIT-211- | 1046 | RASQSIREYLH | 1183 | FGSELRK | 1320 | CQNGHSFPLTF |
| 91 | | | | | | |
| TIGIT-211- | 1047 | RSSQSLVHSTGNTYLH | 1184 | AASDLES | 1321 | CQQGHTLPWTF |
| 92 | | | | | | |
| TIGIT-211- | 1048 | SASQDINKYLN | 1185 | HTSRLQS | 1322 | CQQFAYFPATF |
| 93 | | | | | | |
| TIGIT-211- | 1049 | RSSQSLVHSTGNTYLH | 1186 | AASDLES | 1323 | CQQGHTLPWTF |
| 94 | | | | | | |
| TIGIT-211- | 1050 | RASQGVRTSLA | 1187 | AKNNRPS | 1324 | CQQSYSAPYTF |
| 95 | | | | | | |
| TIGIT-211- | 1051 | RSSQSLVHSTGNTYLH | 1188 | AASDLES | 1325 | CQQGHTLPWTF |
| 96 | | | | | | |
| TIGIT-211- | 1052 | RSSQSLVHSTGNTYLH | 1189 | AASDLES | 1326 | CQQGHTLPWTF |
| 97 | | | | | | |
| TIGIT-211- | 1053 | RASHFIGSLLS | 1190 | ETSKLAS | 1327 | CQQSYSYPRTF |
| 98 | | | | | | |
| TIGIT-211- | 1054 | RSSQSLVHSTGNTYLH | 1191 | AASDLES | 1328 | CQQGHTLPWTF |
| 99 | | | | | | |
| TIGIT-211- | 1055 | RSSQSLVHSTGNTYLH | 1192 | AASDLES | 1329 | CQQGHTLPWTF |
| 100 | | | | | | |
| TIGIT-211- | 1056 | RSSQSLVHSTGNTYLH | 1193 | AASDLES | 1330 | CQQGHTLPWTF |
| 101 | | | | | | |
| TIGIT-211- | 1057 | RASQSISNNLN | 1194 | AKNNRPS | 1331 | CQQSYTTPPTF |
| 102 | | | | | | |
| TIGIT-211- | 1058 | RSSQSLVHSTGNTYLH | 1195 | AASDLES | 1332 | CQQGHTLPWTF |
| 103 | | | | | | |
| TIGIT-211- | 1059 | RASQSISNNLN | 1196 | DASSSQS | 1333 | CQQSSSTPWTF |
| 104 | | | | | | |
| TIGIT-211- | 1060 | RSSQSLVHSTGNTYLH | 1197 | AASDLES | 1334 | CQQGHTLPWTF |
| 105 | | | | | | |
| TIGIT-211- | 1061 | RSSQSLVHSTGNTYLH | 1198 | AASDLES | 1335 | CQQGHTLPWTF |
| 106 | | | | | | |
| TIGIT-211- | 1062 | RSSQSLVHSTGNTYLH | 1199 | AASDLES | 1336 | CQQGHTLPWTF |
| 107 | | | | | | |
| TIGIT-211- | 1063 | RSSQSLVHSTGNTYLH | 1200 | AASDLES | 1337 | CQQGHTLPWTF |
| 108 | | | | | | |
| TIGIT-211- | 1064 | RSSQSLVHSTGNTYLH | 1201 | AASDLES | 1338 | CQQGHTLPWTF |
| 109 | | | | | | |
| TIGIT-211- | 1065 | RASQTIERRLN | 1202 | GTTSLES | 1339 | CQQSYTTLWTF |
| 110 | | | | | | |
| TIGIT-211- | 1066 | SGDNLRGYYAS | 1203 | GTSYRYS | 1340 | CQONLAPPYTF |
| 111 | | | | | | |
| TIGIT-211- | 1067 | RSSQSLVHSTGNTYLH | 1204 | AASDLES | 1341 | CQQGHTLPWTF |
| 112 | | | | | | |
| TIGIT-211- | 1068 | SGDKLGHTYTS | 1205 | GKNIRPS | 1342 | CQONLAPPYTF |
| 113 | | | | | | |
| TIGIT-211- | 1069 | RASQSISNNLN | 1206 | TASNLQN | 1343 | CQQSNSWPYTF |
| 114 | | | | | | |
| TIGIT-211- | 1070 | RSSQSLVHSTGNTYLH | 1207 | AASDLES | 1344 | CQQGHTLPWTF |
| 115 | | | | | | |
| TIGIT-211- | 1071 | RASQTIERRLN | 1208 | HDNKRPS | 1345 | CQQGYTLPWTF |
| 116 | | | | | | |
| TIGIT-269-1 | 1072 | RASQSVSSGYLA | 1209 | STSSRAT | 1346 | CQQSASAHPGWTF |
| TIGIT-269-2 | 1073 | RASQSINTFLN | 1210 | GASSLOS | 1347 | CQQGYRAPWTF |
| TIGIT-269-3 | 1074 | RASQSVSSYLN | 1211 | AATSLOS | 1348 | CQQGYSTPWTF |
| TIGIT-269-4 | 1075 | RASQSIRTYLN | 1212 | GASSLOS | 1349 | CQQSYRVPRSF |
| TIGIT-269-5 | 1076 | RASQSVSSGYLA | 1213 | DASSRAT | 1350 | CQHFGGSPLLTF |
| TIGIT-269-6 | 1077 | RASQHIGKYLN | 1214 | GASSLOS | 1351 | CQQTYSPVTF |
| TIGIT-269-7 | 1078 | RASQSIGGYLN | 1215 | AVSSLQS | 1352 | CQQGFYTPWTF |
| TIGIT-269-8 | 1079 | RASQSINTFLN | 1216 | GASSLOS | 1353 | CQQGYRAPWTF |
| TIGIT-269-9 | 1080 | RASQNIGKYLN | 1217 | AASSLOS | 1354 | CHQSYGIPWTF |
| TIGIT-269- | 1081 | RASQNIRNYLN | 1218 | GASSLOS | 1355 | CQQSYRSFFTF |
| 10 | | | | | | |
| TIGIT-269- | 1082 | RASQSIKNYLN | 1219 | TASSLOS | 1356 | CQQSYGNVWTF |
| 11 | | | | | | |
| TIGIT-269- | 1083 | RASQSINTFLN | 1220 | GASSLOS | 1357 | CQQGYRAPWTF |
| 12 | | | | | | |
| TIGIT-269- | 1084 | RASQSITRYLN | 1221 | TTSSLQS | 1358 | CLQAYSTPWTF |
| 13 | | | | | | |
| TIGIT-269- | 1085 | RASEKISTYLN | 1222 | AASSLOS | 1359 | CQQSHQTPWTF |
| 14 | | | | | | |
| TIGIT-269- | 1086 | RASQSVNSNHLA | 1223 | STSSRAT | 1360 | CQQSGSSSLTF |
| 15 | | | | | | |
| TIGIT-269- | 1087 | RASQSISNYLN | 1224 | GATSLOS | 1361 | CQQSYIMSQWTF |
| 16 | | | | | | |
| TIGIT-269- | 1088 | RASQSITRYLN | 1225 | GASSLOS | 1362 | CQQGFRAPRTF |
| 17 | | | | | | |
| TIGIT-269- | 1089 | RASQSVGSYLN | 1226 | SASSLOS | 1363 | COQSHATPWTF |
| 18 | | | | | | |
| TIGIT-269- | 1090 | RASHSVSNNYLA | 1227 | GASSRAT | 1364 | CQLFDRSRPGYTF |
| 19 | | | | | | |
| TIGIT-269- | 1091 | RASQSINTFLN | 1228 | GASSLOS | 1365 | COQGYRAPWTF |
| 20 | | | | | | |
| TIGIT-269- | 1092 | RASQSVSGTYLA | 1229 | GASSRAT | 1366 | CQQYKRSSGFTF |
| 21 | | | | | | |
| TIGIT-471- | 1994 | RASQTIERRLN | 2043 | DASSLHT | 2092 | CQQSYIIPPTF |
| 001 | | | | | | |
| TIGIT-471- | 1995 | RASHGVRTSLA | 2044 | GKNNRPT | 2093 | CQQSLAPPYTF |
| 009 | | | | | | |
| TIGIT-471- | 1996 | RATQAIERRLK | 2045 | DNSSRQT | 2094 | CQQSYIIPYTF |
| 017 | | | | | | |
| TIGIT-471- | 1997 | SASQDINKYLN | 2046 | HTSRLQS | 2095 | CQQYTYFPATF |
| 025 | | | | | | |
| TIGIT-471- | 1998 | RASQGVRTSLA | 2047 | AKNNRPS | 2096 | CQQSYSAPYTF |
| 033 | | | | | | |
| TIGIT-471- | 1999 | SASHDINEYLN | 2048 | HTSRLQS | 2097 | CQQFAYFPATF |
| 041 | | | | | | |
| TIGIT-471- | 2000 | RPAHNIGNFLN | 2049 | KTTWLHS | 2098 | CRHRSSYLPTF |
| 049 | | | | | | |
| TIGIT-471- | 2001 | RASQNIRSYLN | 2050 | GKNIRPS | 2099 | CQQYASVPVTF |
| 005 | | | | | | |
| TIGIT-471- | 2002 | SGNKLGDKYAS | 2051 | RISWLQS | 2100 | CVARPLRGNPHVLF |
| 013 | | | | | | |
| TIGIT-471- | 2003 | RASQGVRTSLA | 2052 | AKNNRPS | 2101 | CQQSYSAPYTF |
| 021 | | | | | | |
| TIGIT-471- | 2004 | RASQGVRTSLA | 2053 | AINNRPS | 2102 | CQQSYSAPYTF |
| 029 | | | | | | |
| TIGIT-471- | 2005 | SASQDIRRYLN | 2054 | HTSTLQS | 2103 | CQQYRLF |
| 037 | | | | | | |
| TIGIT-471- | 2006 | SASQDINKYLN | 2055 | HTSRLQS | 2104 | CQQYTYFF |
| 045 | | | | | | |
| TIGIT-471- | 2007 | RASQNIRSYLN | 2056 | GKNIRPS | 2105 | CQQYASVPVTF |
| 002 | | | | | | |
| TIGIT-471- | 2008 | SAYQDINKYLN | 2057 | HKSRLQS | 2106 | CQQFAYFPATF |
| 010 | | | | | | |
| TIGIT-471- | 2009 | RASQTIERRLN | 2058 | DTSSRHT | 2107 | CQQSYIIPPTF |
| 018 | | | | | | |
| TIGIT-471- | 2010 | RASQDIGNFLN | 2059 | RTSWLQS | 2108 | CQQRSSYPPTF |
| 026 | | | | | | |
| TIGIT-471- | 2011 | RASQSISSYVN | 2060 | RASTLAS | 2109 | CQQFAYFPATF |
| 034 | | | | | | |
| TIGIT-471- | 2012 | RASQVVSTSLS | 2061 | ANNNRAS | 2110 | CQQSYTAPYTF |
| 042 | | | | | | |
| TIGIT-471- | 2013 | RATQTIETSLK | 2062 | DKNSLQT | 2111 | CQQSYSTPHTF |
| 006 | | | | | | |
| TIGIT-471- | 2014 | RASQNIRSYLN | 2063 | GKNIRPS | 2112 | CQQYASVPVTF |
| 014 | | | | | | |
| TIGIT-471- | 2015 | RASQNIRSYLN | 2064 | GKNIRPS | 2113 | CQQYASVPVTF |
| 022 | | | | | | |
| TIGIT-471- | 2016 | CASQDINKFLN | 2065 | HTSRLQS | 2114 | CQQFASFPATF |
| 030 | | | | | | |
| TIGIT-471- | 2017 | RASQTIERRLN | 2066 | DASSLHT | 2115 | CQQSYIIPPTF |
| 038 | | | | | | |
| TIGIT-471- | 2018 | AASGFNIKDTYIH | 2067 | GTTSLES | 2116 | CQQSYSTPRTF |
| 046 | | | | | | |
| TIGIT-471- | 2019 | RASQTISSYLN | 2068 | ENNNRPS | 2117 | CQQSYIIPPTF |
| 003 | | | | | | |
| TIGIT-471- | 2020 | SASQDINKYLN | 2069 | HTSRLQS | 2118 | CQQVVWRPFTF |
| 011 | | | | | | |
| TIGIT-471- | 2021 | RASQTIERRLN | 2070 | DASSLHT | 2119 | CQQSYIIPPTF |
| 019 | | | | | | |
| TIGIT-471- | 2022 | RASQTISSYLN | 2071 | ENNNRPS | 2120 | CQQSYIIPPTF |
| 027 | | | | | | |
| TIGIT-471- | 2023 | SGDKLGHTYTS | 2072 | RASTLAS | 2121 | CQQGYTLPWTF |
| 035 | | | | | | |
| TIGIT-471- | 2024 | RANQNIGNFLN | 2073 | HTSRLQD | 2122 | CQQLAF |
| 043 | | | | | | |
| TIGIT-471- | 2025 | SASQDINKYLN | 2074 | HTSRLQS | 2123 | CQQFAYFPATF |
| 007 | | | | | | |
| TIGIT-471- | 2026 | RASHGVRTSLA | 2075 | GKNNRPT | 2124 | CQQSYSAPYTF |
| 015 | | | | | | |
| TIGIT-471- | 2027 | RATQSIRSFLN | 2076 | KVSNRFS | 2125 | CQQYDAYPPTL |
| 023 | | | | | | |
| TIGIT-471- | 2028 | RASQDIGNFLN | 2077 | RTSWLQS | 2126 | CQQRSSYSATF |
| 031 | | | | | | |
| TIGIT-471- | 2029 | SGNKLGDKYAS | 2078 | RTTWLQS | 2127 | CVARAVRGNPLVLF |
| 039 | | | | | | |
| TIGIT-471- | 2030 | RASQGVRTSLA | 2079 | GKNIRPI | 2128 | CGQSYRYRLTF |
| 047 | | | | | | |
| TIGIT-471- | 2031 | RASQGVRTSLA | 2080 | AKNNRPS | 2129 | CQQSYSAPYTF |
| 004 | | | | | | |
| TIGIT-471- | 2032 | RASQRISSFLN | 2081 | GKNIRPS | 2130 | CQQSYELPLTF |
| 012 | | | | | | |
| TIGIT-471- | 2033 | CASQDINKYLN | 2082 | HTSRLQS | 2131 | COQFAYFPATF |
| 020 | | | | | | |
| TIGIT-471- | 2034 | RASQSVDRYFN | 2083 | AASSLYS | 2132 | CQQSYRTPLTF |
| 028 | | | | | | |
| TIGIT-471- | 2035 | RASQNIRSYLN | 2084 | GKNIRPS | 2133 | CQQYASVPVTF |
| 036 | | | | | | |
| TIGIT-471- | 2036 | SASQDINKYLN | 2085 | HTSTLQS | 2134 | CQQFAYFPATF |
| 044 | | | | | | |
| TIGIT-471- | 2037 | RSSQSLVHSTGNTYLH | 2086 | QMSHLAS | 2135 | CQQSYSAPTF |
| 008 | | | | | | |
| TIGIT-471- | 2038 | RASQGVRTSLA | 2087 | AKNNRPS | 2136 | CQQSYSAPYTF |
| 016 | | | | | | |
| TIGIT-471- | 2039 | RSSQSLVHSTGNTYLH | 2088 | QMSHLAS | 2137 | CQQSYSAPTF |
| 024 | | | | | | |
| TIGIT-471- | 2040 | RASQGVRTSLA | 2089 | AKNNRPS | 2138 | CQQSYSVPYTF |
| 032 | | | | | | |
| TIGIT-471- | 2041 | RASQGVRTSLA | 2090 | ALNNRPS | 2139 | CQQSYSAPYTF |
| 040 | | | | | | |
| TIGIT-471- | 2042 | GASQTIERRLN | 2091 | DASSLHT | 2140 | CQQSYIIPPTF |
| 048 | | | | | | |

TABLE 14
Variable Domain of Heavy Chain Sequences

| | SEQ | |
|---|---|---|
| Variant | ID NO | Variable Domain of Heavy Chain |
| TIGIT-29-01 | 1367 | EVQLVESGGGLVQAGGSLRLSCAASGRTFSNYAMGWFRQAPGKEREFVAAITW |
| | | SGTRTDYADSVKGRFTISADNAKNTVYLQMNSLKPEDTAVYYCAAAAWTIYEY |
| | | DYWGQGTQVTVSS |
| TIGIT-29-02 | 1368 | EVQLVESGGGLVQAGGSLRLSCAASGRTFDIYAMGWFRQAPGKEREWVSTISW |
| | | SGGRTYYADSVKGRFTISADNAKNTVYLQMNSLKPEDTAVYYCAARPVYRTYG |
| | | SWGQGTQVTVSS |
| TIGIT-29-03 | 1369 | EVQLVESGGGLVQAGGSLRLSCAASGFTFSSYAMGWFRQAPGKEREFVAAITW |
| | | SGTRTDYADSVKGRFTISADNAKNTVYLQMNSLKPEDTAVYYCAAAAWRYSE |
| | | YDYWGQGTQVTVSS |
| TIGIT-29-4 | 1370 | EVQLVESGGGLVQAGGSLRLSCAASGSTFDTYVMGWFRQAPGKERELVSTISSD |
| | | GDSTYYADSVKGRFTISADNAKNTVYLQMNSLKPEDTAVYYCAAGTRRGRNY |
| | | WGQGTQVTVSS |
| TIGIT-29-5 | 1371 | EVQLVESGGGLVQAGGSLRLSCAASGRTFSIYAMGWFRQAPGKEREWVATISSS |
| | | GDRTYYADSVKGRFTISADNAKNTVYLQMNSLKPEDTAVYYCAARRYGRRYD |
| | | YWGQGTQVTVSS |
| TIGIT-29-06 | 1372 | EVQLVESGGGLVQAGGSLRLSCAASGGTFRSYVMGWFRQAPGKEREWVATINS |
| | | SGSRTYYADSVKGRFTISADNAKNTVYLQMNSLKPEDTAVYYCAARPNYRDYE |
| | | YWGQGTQVTVSS |
| TIGIT-29-07 | 1373 | EVQLVESGGGLVQAGGSLRLSCAASGSIFSNYAMGWFRQAPGKEREFVATISRG |
| | | GTRTNYADSVKGRFTISADNAKNTVYLQMNSLKPEDTAVYYCAAAAWTIYAY |
| | | NYWGQGTQVTVSS |
| TIGIT-29-8 | 1374 | EVQLVESGGGLVQAGGSLRLSCAASGRTLDDYVMGWFRQAPGKEREGVATISG |
| | | GGDTTYYADSVKGRFTISADNAKNTVYLQMNSLKPEDTAVYYCAAVPWRWTT |
| | | RRDYWGQGTQVTVSS |
| TIGIT-29-9 | 1375 | EVQLVESGGGLVQAGGSLRLSCAASGFTFDNYAMGWFRQAPGKEREFVSSITW |
| | | SGGRTSYADSVKGRFTISADNAKNTVYLQMNSLKPEDTAVYYCAANAWTIYRY |
| | | DYWGQGTQVTVSS |
| TIGIT-29-10 | 1376 | EVQLVESGGGLVQAGGSLRLSCAASGRTFSNYGMGWFRQAPGKEREFVSGISGS |
| | | GGRTSYADSVKGRFTISADNAKNTVYLQMNSLKPEDTAVYYCAANLWYPVDR |
| | | LNTGFNYWGQGTQVTVSS |
| TIGIT-29-11 | 1377 | EVQLVESGGGLVQAGGSLRLSCAASGRTLSSYAMGWFRQAPGKEREFVASITW |
| | | GGGRTYYADSVKGRFTISADNAKNTVYLQMNSLKPEDTAVYYCATRLWGTWT |
| | | AGDYDYWGQGTQVTVSS |
| TIGIT-29-12 | 1378 | EVQLVESGGGLVQAGGSLRLSCAASGSTFSSYAMGWFRQAPGKEREFVAAITW |
| | | SGTRTNYADSVKGRFTISADNAKNTVYLQMNSLKPEDTAVYYCAAAAWTIYTY |
| | | DSWGQGTQVTVSS |
| TIGIT-29-13 | 1379 | EVQLVESGGGLVQAGGSLRLSCAASGFIFSNYAMGWFRQAPGKEREFVAAITWS |
| | | GGRTYYADSVKGRFTISADNAKNTVYLQMNSLKPEDTAVYYCAAAAWTIYEY |
| | | DYWGQGTQVTVSS |
| TIGIT-29-14 | 1380 | EVQLVESGGGLVQAGGSLRLSCAASGFTFSDYVMGWFRQAPGKEREFVSAISW |
| | | SGTNTNYADSVKGRFTISADNAKNTVYLQMNSLKPEDTAVYYCATRALRDGRG |
| | | YWGQGTQVTVSS |
| TIGIT-29-15 | 1381 | EVQLVESGGGLVQAGGSLRLSCAASGRTFDSYAMGWFRQAPGKEREGVATISG |
| | | SGGRTYYADSVKGRFTISADNAKNTVYLQMNSLKPEDTAVYYCAAAAWTIYEF |
| | | DSWGQGTQVTVTS |
| TIGIT-29-16 | 1382 | EVQLVESGGGLVQAGGSLRLSCAASGSIFSIYAMGWFRQAPGKEREWVATISWG |
| | | GNSTYYADSVKGRFTISADNAKNTVYLQMNSLKPEDTAVYYCAARPRFRTYGY |
| | | WGQGTQVTVSS |
| TIGIT-29-17 | 1383 | EVQLVESGGGLVQAGGSLRLSCAASGSTLSIYAMGWFRQAPGKERELVATISSG |
| | | GGSTYYADSVKGRFTISADNAKNTVYLQMNSLKPEDTAVYYCAAGSVYGRNY |
| | | WGQGTQVTVSS |
| TIGIT-29-18 | 1384 | EVQLVESGGGLVQAGGSLRLSCAASGSTFSNYAMGWFRQAPGKEREFVSAINSS |
| | | GSRTYYADSVKGRFTISADNAKNTVYLQMNSLKPEDTAVYYCAARLWGTWTA |
| | | GDYDYWGQGTQVTVSS |
| TIGIT-29-19 | 1385 | EVQLVESGGGLVQAGGSLRLSCAASGRTFSSYAMGWFRQAPGKEREFVATISGS |
| | | FGRTYYADSVKGRFTISADNAKNTVYLQMNSLKPEDTAVYYCAAGAWTIYEYD |
| | | YWGQGTQVTVSS |
| TIGIT-29-20 | 1386 | EVQLVESGGGLVQAGGSLRLSCAASGSTFSIYAMGWFRQAPGKERELVASISWS |
| | | GDTTNYADSVKGRFTISADNAKNTVYLQMNSLKPEDTAVYYCAAGSVYGRNS |
| | | WGQGTQVTVTS |
| TIGIT-29-21 | 1387 | EVQLVESGGGLVQAGGSLRLSCAASGSTFSNYAMGWFRQAPGKERELVSAITW |
| | | SSSRTYYADSVKGRFTISADNAKNTVYLQMNSLKPEDTAVYYCAAAAWTIYNF |
| | | EYWGQGTQVTVSS |
| TIGIT-29-22 | 1388 | EVQLVESGGGLVQAGGSLRLSCAASGSILSSYTMGWFRQAPGKEREFVSTISRSS |
| | | TRTYYADSVKGRFTISADNAKNTVYLQMNSLKPEDTAVYYCAARLWGTWTAG |
| | | DYDYWGQGTQVTVSS |
| TIGIT-29-23 | 1389 | EVQLVESGGGLVQAGGSLRLSCAASGSTFDIYAMGWFRQAPGKEREFVASISSG |
| | | DTNTNYADSVKGRFTISADNAKNTVYLQMNSLKHEDTAVYYCAAGRYSGYNS |
| | | WGQGTQVTVSS |
| TIGIT-29-24 | 1390 | EVQLVESGGGLVQAGGSLRLSCAASGRTFDTYAMGWLRQAPGKEREFVSAIST |
| | | GDGSTNYADSVKGRFTISADNAKNTVYLQMNSLKPEDTAVYYCAAARRSGRGS |
| | | WGQGTQVTVTS |
| TIGIT-29-25 | 1391 | EVQLVESGGGLVQAGGSLRLSCAASGFTFDNYAMGWFRQAPGKEREGVAAIT |
| | | WSGGRTYYADSVKGRFTISADNAKNTVYLQMNSLKPEDTAVYYCAAAAWTIY |
| | | EYDSWGQGTQVTVTS |
| TIGIT-29-26 | 1392 | EVQLVESGGGLVQAGGSLRLSCAASGFTFDNYAMGWFRQAPGKEREFVATITW |
| | | SGTRTNYADSVKGRFTISADNAKNTVYLQMNSLKPEDTAVYYCAAAAWTIYDY |
| | | DYWGQGTQVTVSS |
| TIGIT-29-27 | 1393 | EVQLVESGGGLVQAGGSLRLSCAASGRTFSNNVMGWFRQAPGKEREFVAAISW |
| | | GGASTNYADSVKGRFTISADNAKNTVYLQMNSLKPEDTAVYYCAAGPKTPDTR |
| | | NYWGQGTQVTVSS |
| TIGIT-29-28 | 1394 | EVQLVESGGGLVQAGGSLRLSCAASGFIFDSYAMGWFRQAPGKEREFVAAISW |
| | | GGSNTNYADSVKGRFTISADNAKNTVYLQMNSLKPEDTAVYYCAAVRITDGRD |
| | | YWGQGTQVTVSS |
| TIGIT-29-29 | 1395 | EVQLVESGGGLVQAGGSLRLSCAASGRTFSNYAMGWFRQAPGKEREFVAAITW |
| | | SGTRTDYADSVKGRFTISADNAKNTVYLQMNSLKPEDTAVYYCAAAAWTIYEY |
| | | DYWGQGTQVTVSS |
| TIGIT-29-30 | 1396 | EVQLVESGGGLVQAGGSLRLSCAASGFTFSSYAMGWFRQAPGKEREFVAAITW |
| | | SGTRTDYADSVKGRFTISADNAKNTVYLQMNSLKPEDTAVYYCAAAAWRYSE |
| | | YDYWGQGTQVTVSS |
| TIGIT-29-31 | 1397 | EVQLVESGGGLVQAGGSLRLSCAASGFTFSIYAMGWFRQAPGKEREWVSTISWS |
| | | GGNTYYADSVKGRFTISADNAKNTVYLQMNSLKPEDTAVYYCATRPRFRRYDS |
| | | WGQGTQVTVSS |
| TIGIT-29-32 | 1398 | EVQLVESGGGLVQAGGSLRLSCAASGSTFDSYAMGWFRQAPGKEREGVAAITT |
| | | SGSSTYYADSVKGRFTISADNAKNTVYLQMNSLKPEDTAVYYCAARGGVRSGS |
| | | PGTYNYWGQGTQVTVSS |
| TIGIT-29-33 | 1399 | EVQLVESGGGLVQAGGSLRLSCAASGFIFSTYAMGWFRQAPGKERELVSAITRS |
| | | GITTYYADSVKGRFTISADNAKNTVYLQMNSLKPEDTAVYYCAAAAWTIYEYD |
| | | YWGQGTQVTVSS |
| TIGIT-29-34 | 1400 | EVQLVESGGGLVQAGGSLRLSCAASGFTFRNYAMGWFRQAPGKEREFVSSISSS |
| | | SSRTSYADSVKGRFTISADNAKNTVYLQMNSLKPEDTAVYYCAARLWGTWTA |
| | | GDYDYWGQGTQVTVSS |
| TIGIT-29-35 | 1401 | EVQLVESGGGLVQAGGSLRLSCAASGRIFSIYTMGWFRQAPGKEREWVATINSS |
| | | GSRTYYADSVKGRFTISADNAKNTVYLQMNSLKPEDTAVYYCAARPSYNRYDS |
| | | WGQGTQVTVSS |
| TIGIT-29-36 | 1402 | EVQLVESGGGLVQAGGSLRLSCAASGFTFSSYAMGWFRQAPGKEREFVASITWS |
| | | GTSTNYADSVKGRFTISADNAKNTVYLQMNSLKPEDTAVYYCAAAAWTIYAYD |
| | | YWGQGTQVTVSS |
| TIGIT-29-37 | 1403 | EVQLVESGGGLVQAGGSLRLSCAASGRTFSNYAMGWFRQAPGKEREFVAGISW |
| | | SGTRTYYADSVKGRFTISADNAKNTVYLQMNSLKPEDTAVYYCAAAAWTIYEY |
| | | DYWGQGTQVTVSS |
| TIGIT-29-38 | 1404 | EVQLVESGGGLVQAGGSLRLSCAASGSTFSSYAMGWFRQAPGKEREFVSAISRN |
| | | GASTSYADSVKGRFTISADNAKNTVYLQMNSLKPEDTAVYYCAAAGTRFDYW |
| | | GQGTQVTVSS |
| TIGIT-29-39 | 1405 | EVQLVESGGGLVQAGGSLRLSCAASGRTLDDYVMGWFRQAPGKEREGVATISG |
| | | GGDTTYYADSVKGRFTISADNAKNTVYLQMNSLKPEDTAVYYCAAVPWRWTT |
| | | RRDYWGQGTQVTVSS |
| TIGIT-29-40 | 1406 | EVQLVESGGGLVQAGGSLRLSCAASGFTFDNYAMGWFRQAPGKEREFVATITW |
| | | SGTRTNYADSVKGRFTISADNAKNTVYLQMNSLKPEDTAVYYCAAAAWTIYDY |
| | | DYWGQGTQVTVSS |
| TIGIT-29-41 | 1407 | EVQLVESGGGLVQAGGSLRLSCAASGRTFSTNAMGWFRQAPGKEREWVTAITT |
| | | SGGNTYYADSVKGRFTISADNAKNTVYLQMNSLKPEDTAVYYCAARDETYGTY |
| | | DYWGQGTQVTVSS |
| TIGIT-29-42 | 1408 | EVQLVESGGGLVQAGGSLRLSCAASGSTFSTYAMGWFRQAPGKEREFVATISTS |
| | | SSRTYYADSVKGRFTISADNAKNTVYLQMNSLKPEDTAVYYCAARLWGTWTA |
| | | GDYDYWGQGTQVTVSL |
| TIGIT-29-43 | 1409 | EVQLVESGGGLVQAGGSLRLSCAASGRTFDSYAMGWFRQAPGKEREWVSAISW |
| | | SGSSTYYADSVKGRFTISADNAKNTVYLQMNSLKPEDTAVYYCAARGGYGRYD |
| | | SWGQGTQVTVTS |
| TIGIT-29-44 | 1410 | EVQLVESGGGLVQAGGSLRLSCAASGFTFDNYAMGWFRQAPGKEREFVATITW |
| | | SGTTTNYADSVKGRFTISADNAKNTVYLQMNSLKPEDTAVYYCAAAAWTIYDY |
| | | DYWGQGTQVTVSS |
| TIGIT-29-45 | 1411 | EVQLVESGGGLVQAGGSLRLSCAASGFTFSSYAMGWFRQAPGKEREFVASITWS |
| | | GTRTDYADSVKGRFTISADNAKNTVYLQMNSLKPEDTAVYYCAAAAWTIYGYE |
| | | YWGQGTQVTVSS |
| TIGIT-29-46 | 1412 | EVQLVESGGGLVQAGGSLRLSCAASGSTFDIYAMGWFRQAPGKEREFVASISSG |
| | | DTNTYYADSVKGRFTISADNAKNTVYLQMNSLKHEDTAVYYCAAGRYSGYNS |
| | | WGQGTQVTVSS |
| TIGIT-29-47 | 1413 | EVQLVESGGGLVQAGGSLRLSCAASGSTLSSYAMGWFRQAPGKERELVAAITGS |
| | | GGRTYYADSVKGRFTISADNAKNTVYLQMNSLKPEDTAVYYCAANRRYSFPY |
| | | WSFWYDDFDYWGQGTQVTVSS |
| TIGIT-30-01 | 1414 | EVQLVESGGGLVQAGGSLRLSCAASGFAFSSYWMGWFRQAPGKERELVAARNS |
| | | GGNTNYADSVKGRFTISADNAKNTVYLQMNSLKPEDTAVYYCAADVWYGSTW |
| | | RNWGQGTQVTVSS |
| TIGIT-30-02 | 1415 | EVQLVESGGGLVQAGGSLRLSCAASGRTFGDYIMGWFRQAPGKERELVATISGG |
| | | GSTNYADSVKGRFTISADNAKNTVYLQMNSLKPEDTAVYYCAAVFSRGPLTWG |
| | | QGTQVTVSS |
| TIGIT-30-03 | 1416 | EVQLVESGGGLVQAGGSLRLSCAASGNIFSRYIMGWFRQAPGKEREWVAGISNG |
| | | GTTKYADSVKGRFTISADNAKNTVYLQMNSLKPEDTAVYYCAQGWKIRPTIWG |
| | | QGTQVTVSS |
| TIGIT-30-04 | 1417 | EVQLVESGGGLVQAGGSLRLSCAASGFTFSTHWMGWFRQAPGKERELVAARNS |
| | | GGNTNYADSVKGRFTISADNAKNTVYLQMNSLKPEDTAVYYCAADVWYGSTW |
| | | RNWGQGTQVTVSS |
| TIGIT-30-5 | 1418 | EVQLVESGGGLVQAGGSLRLSCAASGGTFRNYGMGWFRQAPGKERELVAAISW |
| | | SGVSTIYADSVKGRFTISADNAKNTVYLQMNSLKPEDTAVYYCASSPYGPLYRS |
| | | THYYDWGQGTQVTVSS |
| TIGIT-30-6 | 1419 | EVQLVESGGGLVQAGGSLRLSCAASGRFSRINSMGWFRQAPGKERELVAHIFRS |
| | | GITSYASYADSVKGRFTISADNAKNTVYLQMNSLKPEDTAVYYCAIGRGSWGQ |
| | | GTQVTVSS |
| TIGIT-30-7 | 1420 | EVQLVESGGGLVQAGGSLRLSCAASGIPASIRTMGWFRQAPGKEREGISLITSDD |
| | | GSTYYADSVKGRFTISADNAKNTVYLQMNSLKPEDTAVYYCAWTTNRGMDWG |
| | | QGTQVTVSS |
| TIGIT-30-8 | 1421 | EVQLVESGGGLVQAGGSLRLSCAASGFTMSSSWMGWFRQAPGKEREFVATLTS |
| | | GGSTNYADSVKGRFTISADNAKNTVYLQMNSLKPEDTAVYYCAADVWYGSTW |
| | | RNWGQGTQVTVSS |
| TIGIT-30-9 | 1422 | EVQLVESGGGLVQAGGSLRLSCAASGPISGINRMGWFRQAPGKEREWVSTITEN |
| | | GDHTYYADSVKGRFTISADNAKNTVYLQMNSLKPEDTAVYYCAARPYTRPGSM |
| | | WVSSLYDWGQGTQVTVSS |
| TIGIT-30-10 | 1423 | EVQLVESGGGLVQAGGSLRLSCAASVRTFSLSDMGWFRQAPGKEREFVGAINW |
| | | LSESTYYADSVKGRFTISADNAKNTVYLQMNSLKPEDTAVYYCAAQGGVLSGW |
| | | DWGQGTQVTVSS |
| TIGIT-30-11 | 1424 | EVQLVESGGGLVQAGGSLRLSCAASGSITSIRSMGWFRQAPGKEREWVSSVYIF |
| | | GGSTYYADSVKGRFTISADNAKNTVYLQMNSLKPEDTAVYYCANSNKPKFDW |
| | | GQGTQVTVSS |
| TIGIT-30-12 | 1425 | EVQLVESGGGLVQAGGSLRLSCAASGRTFGDYIMGWFRQAPGKERELVASVSG |
| | | GGNSDYADSVKGRFTISADNAKNTVYLQMNSLKPEDTAVYYCAAVFSRGPLTW |
| | | GQGTQVTVSS |
| TIGIT-30-13 | 1426 | EVQLVESGGGLVQAGGSLRLSCAASGRTFSNYFMGWFRQAPGKERESVAAINW |
| | | DSARTYYADSVKGRFTISADNAKNTVYLQMNSLKPEDTAVYYCASAGRWGQG |
| | | TQVTVSS |
| TIGIT-30-14 | 1427 | EVQLVESGGGLVQAGGSLRLSCAASGPTFSIYDMGWFRQAPGKEREFVAAITW |
| | | NSGRTNYADSVKGRFTISADNAKNTVYLQMNSLKPEDTAVYYCAAGAWSSLR |
| | | KTAASWGQGTQVTVSS |
| TIGIT-30-15 | 1428 | EVQLVESGGGLVQAGGSLRLSCAASGFTFSGNWMGWFRQAPGKEREWVSGISS |
| | | GGGRTYYADSVKGRFTISADNAKNTVYLQMNSLKPEDTAVYYCAADVWYGST |
| | | WRNWGQGTQVTVSS |
| TIGIT-30-16 | 1429 | EVQLVESGGGLVQAGGSLRLSCAASGFPFSEYPMGWFRQAPGKEREFVAVVNW |
| | | NGDSTYYADSVKGRFTISADNAKNTVYLQMNSLKPEDTAVYYCANFNRDWGQ |
| | | GTQVTVSS |
| TIGIT-30-17 | 1430 | EVQLVESGGGLVQAGGSLRLSCAASGSIFNIGMGWFRQAPGKEREWVSSIYSNG |
| | | HTYYADSVKGRFTISADNAKNTVYLQMNSLKPEDTAVYYCANSNKPKFDWGQ |
| | | GTQVTVSS |
| TIGIT-30-18 | 1431 | EVQLVESGGGLVQAGGSLRLSCAASGRAFSLRTMGWFRQAPGKEREGISLITSD |
| | | DGSTYYADSVKGRFTISADNAKNTVYLQMNSLKPEDTAVYYCAWTTNRGMDW |
| | | GQGTQVTVSS |
| TIGIT-30-19 | 1432 | EVQLVESGGGLVQAGGSLRLSCAASGRTFSSYAMMGWFRQAPGKEREFLAIITD |
| | | GSKTLYADSVKGRFTISADNAKNTVYLQMNSLKPEDTAVYYCAAQFTLARHLV |
| | | WGQGTQVTVSS |
| TIGIT-30-20 | 1433 | EVQLVESGGGLVQAGGSLRLSCAASGPTFSIYDMGWFRQAPGKEREFVAVINWS |
| | | RGSTFYADSVKGRFTISADNAKNTVYLQMNSLKPEDTAVYYCAAGVWSSLRHT |
| | | AANWGQGTQVTVSS |
| TIGIT-30-21 | 1434 | EVQLVESGGGLVQAGGSLRLSCAASGFTFSTSWMGWFRQAPGKERELVATINS |
| | | GGGTNYADSVKGRFTISADNAKNTVYLQMNSLKPEDTAVYYCAADVWYGSTW |
| | | RNWGQGTQVTVSS |
| TIGIT-30-22 | 1435 | EVQLVESGGGLVQAGGSLRLSCAASGFTLSGNWMGWFRQAPGKEREFVASISSS |
| | | GVSKHYADSVKGRFTISADNAKNTVYLQMNSLKPEDTAVYYCAADVWYGSTW |
| | | RNWGRGTQVTVSS |
| TIGIT-30-23 | 1436 | EVQLVESGGGLVQAGGSLRLSCAASGRAFRRYTMGWFRQAPGKEREFVAAIRW |
| | | SGGTTFYADSVKGRFTISADNAKNTVYLQMNSLKPEDTAVYYCAAEWAAMKD |
| | | WGQGTQVTVSS |
| TIGIT-30-24 | 1437 | EVQLVESGGGLVQAGGSLRLSCAASGNIFSRYIMGWFRQAPGKEREWVAGISNG |
| | | GTTKYADSVKGRFTISADNAKNTVYLQMNSLKPEDTAVYYCAQGWKIIPTDWG |
| | | QGTQVTVSS |
| TIGIT-30-25 | 1438 | EVQLVESGGGLVQAGGSLRLSCAASGPTFSIYDMGWFRQAPGKEREFVASTIWS |
| | | RGDTYYADSVKGRFTISADNAKNTVYLQMNSLKPEDTAVYYCAAGVWSSLRH |
| | | TAANWGQGTQVTVSS |
| TIGIT-30-26 | 1439 | EVQLVESGGGLVQAGGSLRLSCAASGRTYYAMGWFRQAPGKEREFLAIITDGSK |
| | | TLYADSVKGRFTISADNAKNTVYLQMNSLKPEDTAVYYCAAQFTLARHLVWG |
| | | QGTQVTVSS |
| TIGIT-30-27 | 1440 | EVQLVESGGGLVQAGGSLRLSCAASGFTFSTSWMGWFRQAPGKEREFVAGILSD |
| | | GRELYADSVKGRFTISADNAKNTVYLQMNSLKPEDTAVYYCAADVWYGSTWR |
| | | NWGQGTQVTVSS |
| TIGIT-30-28 | 1441 | EVQLVESGGGLVQAGGSLRLSCAASGRTFESYRMGWFRQAPGKEREFVGGINW |
| | | SGRTYYADSVKGRFTISADNAKNTVYLQMNSLKPEDTAVYYCAARRLYSGSYL |
| | | DWGQGTQVTVSS |
| TIGIT-30-29 | 1442 | EVQLVESGGGLVQAGGSLRLSCAASGSSLSFNAMGWFRQAPGKEREWVSSVYI |
| | | FGGSTYYADSVKGRFTISADNAKNTVYLQMNSLKPEDTAVYYCANSNKPKFDW |
| | | GQGTQVTVSS |
| TIGIT-30-30 | 1443 | EVQLVESGGGLVQAGGSLRLSCAASGGTFSGRGMGWFRQAPGKEREWVSSVYI |
| | | FGGSTYYADSVKGRFTISADNAKNTVYLQMNSLKPEDTAVYYCANSNKPKFDW |
| | | GQGTQVTVSS |
| TIGIT-30-31 | 1444 | EVQLVESGGGLVQAGGSLRLSCAASGPTFSWTMMGWFRQAPGKEREFLAIITDG |
| | | SKTLYADSVKGRFTISADNAKNTVYLQMNSLKPEDTAVYYCAAQFTLARHLVW |
| | | GQGTQVTVSS |
| TIGIT-30-32 | 1445 | EVQLVESGGGLVQAGGSLRLSCAASGIIGTIRTMGWFRQAPGKEREGISLITSDD |
| | | GSTYYADSVKGRFTISADNAKNTVYLQMNSLKPEDTAVYYCAWTTNRGMDWG |
| | | QGTQVTVSS |
| TIGIT-30-33 | 1446 | EVQLVESGGGLVQAGGSLRLSCAASGFTLENNMMGWFRQAPGKERELVSAIGW |
| | | SGASTYYADSVKGRFTISADNAKNTVYLQMNSLKPEDTAVYYCAANLRGDNW |
| | | GQGTQVTVSS |
| TIGIT-30-34 | 1447 | EVQLVESGGGLVQAGGSLRLSCAASGNIFSRYIMGWFRQAPGKEREWVAGISSG |
| | | GTTKYADSVKGRFTISADNAKNTVYLQMNSLKPEDTAVYYCAQGWKIVPTNW |
| | | GQGTQVTVSS |
| TIGIT-30-35 | 1448 | EVQLVESGGGLVQAGGSLRLSCAASGNIDRLYAMGWFRQAPGKEREGISLITSD |
| | | DGSTYYADSVKGRFTISADNAKNTVYLQMNSLKPEDTAVYYCASSGPADARNG |
| | | ERWAWGQGTQVTVSS |
| TIGIT-30-36 | 1449 | EVQLVESGGGLVQAGGSLRLSCAASGSIASIHAIGWFRQAPGKEREWVSSVYIFG |
| | | GSTYYADSVKGRFTISADNAKNTVYLQMNSLKPEDTAVYYCANSNKPKFDWG |
| | | QGTQVTVSS |
| TIGIT-30-37 | 1450 | EVQLVESGGGLVQAGGSLRLSCAASGRTFSSKAMGWFRQAPGKEREWVSSVYI |
| | | FGGSTYYADSVKGRFTISADNAKNTVYLQMNSLKPEDTAVYYCANSNKPKFDW |
| | | GQGTQVTVSS |
| TIGIT-30-38 | 1451 | EVQLVESGGGLVQAGGSLRLSCAASGSIASFNAMGWFRQAPGKEREWVSSVYIF |
| | | GGSTYYADSVKGRFTISADNAKNTVYLQMNSLKPEDTAVYYCANSNKPKFDW |
| | | GQGTQVTVSS |
| TIGIT-30-39 | 1452 | EVQLVESGGGLVQAGGSLRLSCAASGFTFSTSWMGWFRQAPGKEREWVVGISS |
| | | GGSTHYADSVKGRFTISADNAKNTVYLQMNSLKPEDTAVYYCAADVWYGSTW |
| | | RNWGQGTQVTVSS |
| TIGIT-30-40 | 1453 | EVQLVESGGGLVQAGGSLRLSCAASGFTFSGNWMGWFRQAPGKEREWVVGISS |
| | | GGSTHYADSVKGRFTISADNAKNTVYLQMNSLKPEDTAVYYCAADVWYGSTW |
| | | RNWGQGTQVTVSS |
| TIGIT-30-41 | 1454 | EVQLVESGGGLVQAGGSLRLSCAASGRTFSSYAMMGWFRQAPGKEREFLAIITD |
| | | GSKTLYADSVKGRFTISADNAKNTVYLQMNSLKPEDTAVYYCAAQFILARHLV |
| | | WGQGTQVTVSS |
| TIGIT-30-42 | 1455 | EVQLVESGGGLVQAGGSLRLSCAASGITITTEVMGWFRQAPGKEREYVAAIHW |
| | | NGDSTAYADSVKGRFTISADNAKNTVYLQMNSLKPEDTAVYYCAQVSQWRAW |
| | | GQGTQVTVSS |
| TIGIT-30-43 | 1456 | EVQLVESGGGLVQAGGSLRLSCAASGFTFSTSWMGWFRQAPGKERELVAARNS |
| | | GGNTNYADSVKGRFTISADNAKNTVYLQMNSLKPEDTAVYYCAADVWYGSTW |
| | | RNWGQGTQVTVSS |
| TIGIT-30-44 | 1457 | EVQLVESGGGLVQAGGSLRLSCAASGVTLDLYAMGWFRQAPGKEREFVAGIW |
| | | RSGGSTVYADSVKGRFTISADNAKNTVYLQMNSLKPEDTAVYYCATWTTTWG |
| | | RNRDWGQGTQVTVSS |
| TIGIT-30-45 | 1458 | EVQLVESGGGLVQAGGSLRLSCAASGGTFSGGFMGWFRQAPGKEREWVASVL |
| | | RGGYTWYADSVKGRFTISADNAKNTVYLQMNSLKPEDTAVYYCANGGSSYWG |
| | | QGTQVTVSS |
| TIGIT-30-46 | 1459 | EVQLVESGGGLVQAGGSLRLSCAASGRTFSTYASMWWFRQAPGKEREFLAIITD |
| | | GSKTLYADSVKGRFTISADNAKNTVYLQMNSLKPEDTAVYYCAGSWSYPGLTW |
| | | GQGTQVTVSS |
| TIGIT-30-47 | 1460 | EVQLVESGGGLVQAGGSLRLSCAASGFTMSSSWMGWFRQAPGKEREWVVGISS |
| | | GGSTHYADSVKGRFTISADNAKNTVYLQMNSLKPEDTAVYYCAADVWYGSTW |
| | | RNWGQGTQVTVSS |
| TIGIT-30-48 | 1461 | EVQLVESGGGLVQAGGSLRLSCAASGFPVNRYSMGWFRQAPGKERELVSAIGW |
| | | SGASTYYADSVKGRFTISADNAKNTVYLQMNSLKPEDTAVYYCAADFWLARLR |
| | | VADDYDWGQGTQVTVSS |
| TIGIT-30-49 | 1462 | EVQLVESGGGLVQAGGSLRLSCAASGNIFSRYIMGWFRQAPGKEREWVAGISNG |
| | | GTTKYADSVKGRFTISADNAKNTVYLQMNSLKPEDTAVYYCAQGWKIVPTNW |
| | | GQGTQVTVSS |
| TIGIT-30-50 | 1463 | EVQLVESGGGLVQAGGSLRLSCAASGRSFSNYVMGWFRQAPGKERERVATITS |
| | | GGLTVYADSVKGRFTISADNAKNTVYLQMNSLKPEDTAVYYCALYRVNWGQG |
| | | TQVTVSS |
| TIGIT-30-51 | 1464 | EVQLVESGGGLVQAGGSLRLSCAASGSIFSISDMGWFRQAPGKEREFVGAINWL |
| | | SESTYYADSVKGRFTISADNAKNTVYLQMNSLKPEDTAVYYCAAQGGVLSGW |
| | | DWGQGTQVTVSS |
| TIGIT-30-52 | 1465 | EVQLVESGGGLVQAGGSLRLSCAASGRTFSNYFMGWFRQAPGKERESVATVTW |
| | | RDNITYYADSVKGRFTISADNAKNTVYLQMNSLKPEDTAVYYCASAGRWGQGT |
| | | QVTVSS |
| TIGIT-30-53 | 1466 | EVQLVESGGGLVQAGGSLRLSCAASGLTFSNYVMGWFRQAPGKERESVAAINW |
| | | DSARTYYADSVKGRFTISADNAKNTVYLQMNSLKPEDTAVYYCASAGRWGQG |
| | | TQVTVSS |
| TIGIT-30-54 | 1467 | EVQLVESGGGLVQAGGSLRLSCAASGFTFRSFGMGWFRQAPGKEREFVASTIWS |
| | | RGDTYYADSVKGRFTISADNAKNTVYLQMNSLKPEDTAVYYCASSPYGPLYRS |
| | | THYYDWGQGTQVTVSS |
| TIGIT-30-55 | 1468 | EVQLVESGGGLVQAGGSLRLSCAASGNTFSGGFMGWFRQAPGKEREWVASVL |
| | | RGGYTWYADSVKGRFTISADNAKNTVYLQMNSLKPEDTAVYYCATGWQSTTK |
| | | SQGWGQGTQVTVSS |
| TIGIT-30-56 | 1469 | EVQLVESGGGLVQAGGSLRLSCAASGLTISTYPMGWFRQAPGKEREFVAAVNW |
| | | SGRRELYADSVKGRFTISADNAKNTVYLQMNSLKPEDTAVYYCAAFREYHWG |
| | | QGTQVTVSS |
| TIGIT-30-57 | 1470 | EVQLVESGGGLVQAGGSLRLSCAASGPTFSIYDMGWFRQAPGKEREFVAAITW |
| | | NSGRIGYADSVKGRFTISADNAKNTVYLQMNSLKPEDTAVYYCAAGVWSSLRH |
| | | TAANWGQGTQVTVSS |
| TIGIT-30-58 | 1471 | EVQLVESGGGLVQAGGSLRLSCAASGFAFGDSWMGWFRQAPGKEREWVSGISS |
| | | GGGRTYYADSVKGRFTISADNAKNTVYLQMNSLKPEDTAVYYCAADVWYGST |
| | | WRNWGQGTQVTVSS |
| TIGIT-31-01 | 1472 | EVQLVESGGGLVQPGGSLRLSCAASGFTFDRSWMGWFRQAPGKEREVVASITS |
| | | GGSTYYADSVKGRFTISADNSKNTAYLQMNSLKPEDTAVYYCAADVWYGSTW |
| | | RNWGQGTLVTVSS |
| TIGIT-31-02 | 1473 | EVQLVESGGGLVQPGGSLRLSCAASGRTFGDYIMGWFRQAPGKERELVAEITRS |
| | | GRTNYADSVKGRFTISADNSKNTAYLQMNSLKPEDTAVYYCAAVFSRGPLTWG |
| | | QGTLVTVSS |
| TIGIT-31-03 | 1474 | EVQLVESGGGLVQPGGSLRLSCAASGFTFSGNWMGWFRQAPGKEREFVASISSS |
| | | GISTYYADSVKGRFTISADNSKNTAYLQMNSLKPEDTAVYYCAADVWYGSTWR |
| | | NWGQGTLVTVSS |
| TIGIT-31-04 | 1475 | EVQLVESGGGLVQPGGSLRLSCAASGFPVNRYWMGWFRQAPGKERELVATITS |
| | | GGSTNYADSVKGRFTISADNSKNTAYLQMNSLKPEDTAVYYCAADVWYGSTW |
| | | RNWGQGTLVTVSS |
| TIGIT-31-05 | 1476 | EVQLVESGGGLVQPGGSLRLSCAASGRTFGDYIMGWFRQAPGKEREFVATISRG |
| | | GGSTYVDSVKGRFTISADNSKNTAYLQMNSLKPEDTAVYYCAAVFSRGPLTWG |
| | | QGTLVTVSS |
| TIGIT-31-06 | 1477 | EVQLVESGGGLVQPGGSLRLSCAASGFTFSTSWMGWFRQAPGKERELVASITSG |
| | | GSTYYADSVKGRFTISADNSKNTAYLQMNSLKPEDTAVYYCAADVWYGSTWR |
| | | NWGQGTLVTVSS |
| TIGIT-31-7 | 1478 | EVQLVESGGGLVQPGGSLRLSCAASGSTFSINRMGWFRQAPGKEREWVATIVHS |
| | | GGHSGGTSYYADSVKGRFTISADNSKNTAYLQMNSLKPEDTAVYYCAARPYTR |
| | | PGSMWVSSLYDWGQGTLVTVSS |
| TIGIT-31-08 | 1479 | EVQLVESGGGLVQPGGSLRLSCAASGFTFSTSWMGWFRQAPGKERELVAARNS |
| | | GGNTNYADSVKGRFTISADNSKNTAYLQMNSLKPEDTAVYYCAADVWYGSTW |
| | | RNWGQGTLVTVSS |
| TIGIT-31-9 | 1480 | EVQLVESGGGLVQPGGSLRLSCAASGGTLSGNAMGWFRQAPGKEREWVASIY |
| | | WSSGNTYYADSVKGRFTISADNSKNTAYLQMNSLKPEDTAVYYCANSNKPKFD |
| | | WGQGTLVTVSS |
| TIGIT-31-10 | 1481 | EVQLVESGGGLVQPGGSLRLSCAASGHTFSSYGMGWFRQAPGKERELVAAISW |
| | | SGISTIYADSVKGRFTISADNSKNTAYLQMNSLKPEDTAVYYCASSPYGPLYRST |
| | | HYYDWGQGTLVTVSS |
| TIGIT-31-11 | 1482 | EVQLVESGGGLVQPGGSLRLSCAASGFTFSTSWMGWFRQAPGKEREFVASISTS |
| | | GNTFYADSVKGRFTISADNSKNTAYLQMNSLKPEDTAVYYCAADVWYGSTWR |
| | | NWGQGTLVTVSS |
| TIGIT-31-12 | 1483 | EVQLVESGGGLVQPGGSLRLSCAASGFTFSRYWMGWFRQAPGKEREAVASITS |
| | | GGSTYYADSVKGRFTISADNSKNTAYLQMNSLKPEDTAVYYCAADVWYGSTW |
| | | RNWGQGTLVTVSS |
| TIGIT-31-13 | 1484 | EVQLVESGGGLVQPGGSLRLSCAASGFTFDRSWMGWFRQAPGKEREWVASITS |
| | | GGTTNYADSVKGRFTISADNSKNTAYLQMNSLKPEDTAVYYCAADVWYGSTW |
| | | RNWGQGTLVTVSS |
| TIGIT-31-14 | 1485 | EVQLVESGGGLVQPGGSLRLSCAASGYTFRAYVMGWFRQAPGKERELVAVINY |
| | | RGSSLKYADSVKGRFTISADNSKNTAYLQMNSLKPEDTAVYYCAASEWGGSDY |
| | | DHDYDWGQGTLVTVSS |
| TIGIT-31-15 | 1486 | EVQLVESGGGLVQPGGSLRLSCAASGFTFSTYGMGWFRQAPGKEREFVAAISWS |
| | | GVSKHYADSVKGRFTISADNSKNTAYLQMNSLKPEDTAVYYCASSPYGPLYRST |
| | | HYYDWGQGTLVTVSS |
| TIGIT-31-16 | 1487 | EVQLVESGGGLVQPGGSLRLSCAASGFTESTSWMGWFRQAPGKERELVVSVTS |
| | | GGYTNYADSVKGRFTISADNSKNTAYLQMNSLKPEDTAVYYCAADVWYGSTW |
| | | RNWGQGTLVTVSS |
| TIGIT-31-17 | 1488 | EVQLVESGGGLVQPGGSLRLSCAASGFTMSSSWMGWFRQAPGKEREWVASINS |
| | | GGTRNYADSVKGRFTISADNSKNTAYLQMNSLKPEDTAVYYCAADVWYGSTW |
| | | RNWGQGTLVTVSS |
| TIGIT-31-18 | 1489 | EVQLVESGGGLVQPGGSLRLSCAASGFTFSGNWMGWFRQAPGKEREFVASISSG |
| | | SAINYADSVKGRFTISADNSKNTAYLQMNSLKPEDTAVYYCAADVWYGSTWR |
| | | NWGQGTLVTVSS |
| TIGIT-31-19 | 1490 | EVQLVESGGGLVQPGGSLRLSCAASGRTFGNYAMGWFRQAPGKEREFVADIRS |
| | | SAGRTYYADSVKGRFTISADNSKNTAYLQMNSLKPEDTAVYYCAASEWGGSDY |
| | | DHDYDWGQGTLVTVSS |
| TIGIT-31-20 | 1491 | EVQLVESGGGLVQPGGSLRLSCAASGFTFSGNWMGWFRQAPGKEREFVAGILS |
| | | DGRELYADSVKGRFTISADNSKNTAYLQMNSLKPEDTAVYYCAADVWYGSTW |
| | | RNWGQGTLVTVSS |
| TIGIT-31-21 | 1492 | EVQLVESGGGLVQPGGSLRLSCAASGFTLSGNWMGWFRQAPGKEREFVASISSS |
| | | GISTYYADSVKGRFIISADNSKNTAYLQMNSLKPEDTAVYYCAADVWYGSTWR |
| | | NWGQGTLVTVSS |
| TIGIT-31-22 | 1493 | EVQLVESGGGLVQPGGSLRLSCAASGRTFSTHAMGWFRQAPGKEREFVAAITPI |
| | | NWGGRGTHYADSVKGRFTISADNSKNTAYLQMNSLKPEDNAVYYCAAKRLRS |
| | | GRWTWGQGTLVTVSS |
| TIGIT-31-23 | 1494 | EVQLVESGGGLVQPGGSLRLSCAASGFTFSNSGMGWFRQAPGKEREWVASIYW |
| | | SSGNTYYADSVKGRFTISADNSKNTAYLQMNSLKPEDTAVYYCANSNKPKFDW |
| | | GQGTLVTVSS |
| TIGIT-31-24 | 1495 | EVQLVESGGGLVQPGGSLRLSCAASGRTFSMGWFRQAPGKEREFVATVRWGTS |
| | | STYYADSVKGRFTISADNSKNTAYLQMNSLKPEDTAVYYCAAETFGSGSSLMSE |
| | | YDWGQGTLVTVSS |
| TIGIT-31-25 | 1496 | EVQLVESGGGLVQPGGSLRLSCAASGNIFSRYIMGWFRQAPGKEREWVAGISNG |
| | | GTTKYADSVKGRFTISADNSKNTAYLQMNSLKPEDTAVYYCAQGWKIVPTNW |
| | | GQGTLVTVSS |
| TIGIT-31-26 | 1497 | EVQLVESGGGLVQPGGSLRLSCAASGFTFDRSWMGWFRQAPGKERELVAAITS |
| | | GGSTYYADSVKGRFTISADNSKNTAYLQMNSLKPEDTAVYYCAADVWYGSTW |
| | | RNWGQGTLVTVSS |
| TIGIT-31-27 | 1498 | EVQLVESGGGLVQPGGSLRLSCAASGFTFGHYAMGWFRQAPGKEREFVAAISW |
| | | SGVSTYYADSVKGRFTISADNSKNTAYLQMNSLKPEDTAVYYCASSPYGPLYRS |
| | | THYYDWGQGTLVTVSS |
| TIGIT-31-28 | 1499 | EVQLVESGGGLVQPGGSLRLSCAASGRTFSSYHMGWFRQAPGKERELVALISRV |
| | | GVTSYADSVKGRFTISADNSKNTAYLQMNSLKPEDTAVYYCAAVRTYGSATYD |
| | | WGQGTLVTVSS |
| TIGIT-31-29 | 1500 | EVQLVESGGGLVQPGGSLRLSCAASGRSRMGWFRQAPGKEREFVATISWSGSA |
| | | VYADSVKGRFTISADNSKNTAYLQMNSLKPEDTAVYYCAAGGRYSARVWGQG |
| | | TLVTVSS |
| TIGIT-31-30 | 1501 | EVQLVESGGGLVQPGGSLRLSCAASGRTYNMGWFRQAPGKEREWVATIYSRSG |
| | | GSTTYYADSVKGRFTISADNSKNTAYLQMNSLKPEDTAVYYCATYGYDSGRYY |
| | | SWGQGTLVTVSS |
| TIGIT-31-31 | 1502 | EVQLVESGGGLVQPGGSLRLSCAASGFTLSGNWMGWFRQAPGKEREFVASISSG |
| | | GGTNYADSVKGRFTISADNSKNTAYLQMNSLKPEDTAVYYCAADVWYGSTWR |
| | | NWGQGTLVTVSS |
| TIGIT-31-32 | 1503 | EVQLVESGGGLVQPGGSLRLSCAASGFTFSTSWMGWFRQAPGKERELVAAMTS |
| | | GGGTNYADSVKGRFTISADNSKNTAYLQMNSLKPEDTAVYYCAADVWYGSTW |
| | | RNWGQGTLVTVSS |
| TIGIT-31-33 | 1504 | EVQLVESGGGLVQPGGSLRLSCAASGFTFSTSWMGWFRQAPGKERELVASITSG |
| | | GSTNYADSVKGRFTISADNSKNTAYLQMNSLKPEDTAVYYCAADVWYGSTWR |
| | | NWGQGTLVTVSS |
| TIGIT-31-34 | 1505 | EVQLVESGGGLVQPGGSLRLSCAASGRSRYGMGWFRQAPGKEREFVSAISWSGI |
| | | STYYADSVKGRFTISADNSKNTAYLQMNSLKPEDTAVYYCAATQWGSSGWKQ |
| | | ARWYDWGQGTLVTVSS |
| TIGIT-31-35 | 1506 | EVQLVESGGGLVQPGGSLRLSCAASGFTFSTSWMGWFRQAPGKERELVASITSG |
| | | GTTNYADSVKGRFTISADNSKNTAYLQMNSLKPEDTAVYYCAADVWYGSTWR |
| | | NWGQGTLVTVSS |
| TIGIT-31-36 | 1507 | EVQLVESGGGLVQPGGSLRLSCAASGFTFDRSWMGWFRQAPGKERELVASVTS |
| | | GGTTNYADSVKGRFTISADNSKNTAYLQMNSLKPEDTAVYYCAADVWYGSTW |
| | | RNWGQGTLVTVSS |
| TIGIT-31-37 | 1508 | EVQLVESGGGLVQPGGSLRLSCAASGSIFSINSMGWFRQAPGKEREFVAALSWII |
| | | GSTYYADSVKGRFTISADNSKNTAYLQMNSLKPEDTAVYYCAVNGRWRSWSS |
| | | QRDWGQGTLVTVSS |
| TIGIT-31-38 | 1509 | EVQLVESGGGLVQPGGSLRLSCAASGFTFDRSWMGWFRQAPGKERELVASITSG |
| | | GSTSYADSVKGRFTISADNSKNTAYLQMNSLKPEDTAVYYCAADVWYGSTWR |
| | | NWGQGTLVTVSS |
| TIGIT-31-39 | 1510 | EVQLVESGGGLVQPGGSLRLSCAASGFTFSTSWMGWFRQAPGKERELVAGVNS |
| | | NGYINYADSVKGRFTISADNSKNTAYLQMNSLKPEDTAVYYCAADVWYGSTW |
| | | RNWGQGTLVTVSS |
| TIGIT-31-40 | 1511 | EVQLVESGGGLVQPGGSLRLSCAASGSTLRDYVMGWFRQAPGKERELVSSISRS |
| | | GTTMFADSVKGRFTIIADNSKNTAYLLMNSLKPQDTAVYYCAAVFSRGLLTCGQ |
| | | GTLVTVSS |
| TIGIT-31-41 | 1512 | EVQLVESGGGLVQPGGSLRLSCAASGGTLSSYIMGWFRQAPGKEREFVAAISGW |
| | | SGGTTNYADSVKGRFTISADNSKNTAYLQMNSLKPEDTAVYYCAAARFAPGSR |
| | | GYDWGQGTLVTVSS |
| TIGIT-31-42 | 1513 | EVQLVESGGGLVQPGGSLRLSCAASGFTFSTHWMGWFRQAPGKEREFVASIGSS |
| | | GTTRYADSVKGRFTISADNSKNTAYLQMNSLKPEDTAVYYCAADVWYGSTWR |
| | | NWGQGTLVTVSS |
| TIGIT-31-43 | 1514 | EVQLVESGGGLVQPGGSLRLSCAASGGTFSAFPMGWFRQAPGKERELVAAISSG |
| | | GTTYYADSVKGRFTISADNSKNTAYLQMNSLKPEDTAVYYCAAQGGVLSAWD |
| | | WGQGTLLTVSS |
| TIGIT-31-44 | 1515 | EVQLVESGGGLVQPGGSLRLSCAASGFTFSGNWMGWFRQAPGKEREWVASISS |
| | | GGTTNYADSVKGRFTISADNSKNTAYLQMNSLKPEDTAVYYCAADVWYGSTW |
| | | RNWGQGTLVTVSS |
| TIGIT-31-45 | 1516 | EVQLVESGGGLVQPGGSLRLSCAASGFTFSGNWMGWFRQAPGKEREFVAGVNS |
| | | NGYINYADSVKGRFTISADNSKNTAYLQMNSLKPEDTAVYYCAADVWYGSTW |
| | | RNWGQGTLVTVSS |
| TIGIT-31-46 | 1517 | EVQLVESGGGLVQPGGSLRLSCAASGFTFDRSWMGWFRQAPGKERELVASITSG |
| | | GTTSYADSVKGRFTISADNSKNTAYLQMNSLKPEDTAVYYCAADVWYGSTWR |
| | | NWGQGTLVTVSS |
| TIGIT-31-47 | 1518 | EVQLVESGGGLVQPGGSLRLSCAASGFTFSGNWMGWFRQAPGKEREWVVGISS |
| | | GGTPHYADSVKGRFTISADNSKNTAYLQMNSLKPEDTAVYYCAADVWYGSTW |
| | | RNWGQGTLVTVSS |
| TIGIT-31-48 | 1519 | EVQLVESGGGLVQPGGSLRLSCAASGFTLSSNWMGWFRQAPGKERELVAGVNS |
| | | NGYINYADSVKGRFTISADNSKNTAYLQMNSLKPEDTAVYYCAADVWYGSTW |
| | | RNWGQGTLVTVSS |
| TIGIT-31-49 | 1520 | EVQLVESGGGLVQPGGSLRLSCAASGFDFSVSWMGWFRQAPGKERELVARISSG |
| | | GELPYYADSVKGRFTISADNSKNTAYLQMNSLKPKHTAVYYCAARPNTRPGSM |
| | | WGQGTLVTVSS |
| TIGIT-31-50 | 1521 | EVQLVESGGGLVQPGGSLRLSCAASGFTMSSSWMGWFRQAPGKEREFVGGISS |
| | | GGSTYYADSVKGRFTISADNSKNTAYLQMNSLKPEDTAVYYCAADVWYGSTW |
| | | RNWGQGTLVTVSS |
| TIGIT-31-51 | 1522 | EVQLVESGGGLVQPGGSLRLSCAASGRNFRRNSMGWFRQAPGKEREFVAVITRS |
| | | GGGEVTTYADSVKGRFTISADNSKNTAYLQMNSLKPEDTAVYYCAMSSVTRGS |
| | | SDWGQGTLVTVSS |
| TIGIT-31-52 | 1523 | EVQLVESGGGLVQPGGSLRLSCAASGFTFDRSWMGWFRQAPGKEREFVAGITSS |
| | | GIPNYADSVKGRFTISADNSKNTAYLQMNSLKPEDTAVYYCAADVWYGSTWR |
| | | NWGQGTLVTVSS |
| TIGIT-31-53 | 1524 | EVQLVESGGGLVQPGGSLRLSCAASGLTISTYNMGWFRQAPGKERELVSAIGWS |
| | | GASTYYADSVKGRFTISADNSKNTAYLQMNSLKPEDTAVYYCAAFRGRMYDW |
| | | GQGTLVTVSS |
| TIGIT-31-54 | 1525 | EVQLVESGGGLVQPGGSLRLSCAASGFTFSTSWMGWFRQAPGKERELVAAVTS |
| | | GGNTNYADSVKGRFTISADNSKNTAYLQMNSLKPEDTAVYYCAADVWYGSTW |
| | | RNWGQGTLVTVSS |
| TIGIT-31-55 | 1526 | EVQLVESGGGLVQPGGSLRLSCAASGRTFGDYIMGWFRQAPGKERELVAEITRV |
| | | GNTNYADSVKGRFTISADNSKNTAYLQMNSLKPEDTAVYYCAAVFSRGPLTWG |
| | | QGTLVTVSS |
| TIGIT-31-56 | 1527 | EVQLVESGGGLVQPGGSLRLSCAASGRIFRRNSMGWFRQAPGKEREFVAVITRS |
| | | GGGEVTTYADSVKGRFTINADNSKNTAYLQMNSLKPEDTAVYYCAMSSVTRGS |
| | | SDWGQGTLVTVST |
| TIGIT-269-1 | 1528 | QVQLVQSGAEVKKPGSSVKVSCKASGGIFSSYAISWVRQAPGQGLEWMGGIIPT |
| | | NYAQKFQGRVTITADESTSTAYMELSSLRSEDTAVYYCARWRGGLSAFDVWGQ |
| | | GTLVTVSS |
| TIGIT-269-2 | 1529 | QVQLVQSGAEVKKPGSSVKVSCKASGGTYTTHGISWVRQAPGQGLEWMGGIIPI |
| | | NYAQKFQGRVTITADESTSTAYMELSSLRSEDTAVYYCARAFGLASGKGPGVFD |
| | | YWGQGTLVTVSS |
| TIGIT-269-3 | 1530 | EVQLLESGGGLVQPGGSLRLSCAASGFSFGSYAMSWVRQAPGKGLEWVSAITGS |
| | | YYADSVKGRFTISRDNSKNTLYLQMNSLRAEDTAVYYCARVLGNSGRGLDYW |
| | | GQGTLVTVSS |
| TIGIT-269-4 | 1531 | QVQLVQSGAEVKKPGSSVKVSCKASGGPFNKYAISWVRQAPGQGLEWMGGIIP |
| | | MNYAQKFQGRVTITADESTSTAYMELSSLRSEDTAVYYCARGSHQLYYAFEYW |
| | | GQGTLVTVSS |
| TIGIT-269-5 | 1532 | EVQLLESGGGLVQPGGSLRLSCAASGFTFSTYLMIWVRQAPGKGLEWVSAISGS |
| | | YYADSVKGRFTISRDNSKNTLYLQMNSLRAEDTAVYYCARDVEGQVGHFFDPW |
| | | GQGTLVTVSS |
| TIGIT-269-6 | 1533 | EVQLLESGGGLVQPGGSLRLSCAASGFTLSSYSMSWVRQAPGKGLEWVSAINPS |
| | | YYADSVKGRFTISRDNSKNTLYLQMNSLRAEDTAVYYCAKGIKAFGGTRLPLYF |
| | | DSWGQGTLVTVSS |
| TIGIT-269-7 | 1534 | EVQLLESGGGLVQPGGSLRLSCAASGFTFGNYAMSWVRQAPGKGLEWVSAITG |
| | | SYYADSVKGRFTISRDNSKNTLYLQMNSLRAEDTAVYYCAKHLLSRSRGLDVW |
| | | GQGTLVTVSS |
| TIGIT-269-8 | 1535 | EVQLLESGGGLVQPGGSLRLSCAASGFTFGTYSMSWVRQAPGKGLEWVSAITGS |
| | | YYADSVKGRFTISRDNSKNTLYLQMNSLRAEDTAVYYCAKHLLARSGGMHLW |
| | | GQGTLVTVSS |
| TIGIT-269-9 | 1536 | EVQLLESGGGLVQPGGSLRLSCAASGFSFSNHAMSWVRQAPGKGLEWVSAISGS |
| | | YYADSVKGRFTISRDNSKNTLYLQMNSLRAEDTAVYYCARSTRDRAFDYWGQ |
| | | GTLVTVSS |
| TIGIT-269- | 1537 | EVQLLESGGGLVQPGGSLRLSCAASGFSFSSSGMSWVRQAPGKGLEWVSAISGS |
| 10 | | YYADSVKGRFTISRDNSKNTLYLQMNSLRAEDTAVYYCVKVGDYFAFDHWGQ |
| | | GTLVTVSS |
| TIGIT-269- | 1538 | QVQLVQSGAEVKKPGSSVKVSCKASGGTFRRHAISWVRQAPGQGLEWMGGIIP |
| 11 | | MNYAQKFQGRVTITADESTSTAYMELSSLRSEDTAVYYCARGTALVRRAFDIW |
| | | GQGTLVTVSS |
| TIGIT-269- | 1539 | QVQLVQSGAEVKKPGSSVKVSCKASGGTYTTHGISWVRQAPGQGLEWMGGIIPI |
| 12 | | NYAQKFQGRVTITADESTSTAYMELSSLRSEDTAVYYCARAFGLASGKGPGVFD |
| | | YWGQGTLVTVSS |
| TIGIT-269- | 1540 | EVQLLESGGGLVQPGGSLRLSCAASGFTFSNYAMSWVRQAPGKGLEWVSAISG |
| 13 | | GYYADSVKGRFTISRDNSKNTLYLQMNSLRAEDTAVYYCAKHRVGARAFDVW |
| | | GQGTLVTVSS |
| TIGIT-269- | 1541 | EVQLLESGGGLVQPGGSLRLSCAASGFTFSNYAMSWVRQAPGKGLEWVSAISG |
| 14 | | NYYADSVKGRFTISRDNSKNTLYLQMNSLRAEDTAVYYCAKHRVGARAFDVW |
| | | GQGTLVTVSS |
| TIGIT-269- | 1542 | QVQLVQSGAEVKKPGSSVKVSCKASGGTFNIYAISWVRQAPGQGLEWMGGIIPI |
| 15 | | NYAQKFQGRVTITADESTSTAYMELSSLRSEDTAVYYCARHPRDFGIHGLDVWG |
| | | QGTLVTVSS |
| TIGIT-269- | 1543 | QVQLVQSGAEVKKPGSSVKVSCKASGGTFSRYGISWVRQAPGQGLEWMGGIIPI |
| 16 | | NYAQKFQGRVTITADESTSTAYMELSSLRSEDTAVYYCARVRGGYYYDTWGQG |
| | | TLVTVSS |
| TIGIT-269- | 1544 | QVQLVQSGAEVKKPGSSVKVSCKASGGTFTNHAISWVRQAPGQGLEWMGGINP |
| 17 | | LNYAQKFQGRVTITADESTSTAYMELSSLRSEDTAVYYCATGGGHFRSGRDVW |
| | | GQGTLVTVSS |
| TIGIT-269- | 1545 | EVQLLESGGGLVQPGGSLRLSCAASGFTFASYAMSWVRQAPGKGLEWVSAITN |
| 18 | | SYYADSVKGRFTISRDNSKNTLYLQMNSLRAEDTAVYYCARHLRLGRGFDSWG |
| | | QGTLVTVSS |
| TIGIT-269- | 1546 | QVQLVQSGAEVKKPGSSVKVSCKASGGTFTYYPISWVRQAPGQGLEWMGGIIPF |
| 19 | | NYAQKFQGRVTITADESTSTAYMELSSLRSEDTAVYYCATPSGGIGRRLDVWGQ |
| | | GTLVTVSS |
| TIGIT-269- | 1547 | QVQLVQSGAEVKKPGSSVKVSCKASGGTYTTHGISWVRQAPGQGLEWMGGIIPI |
| 20 | | NYAQKFQGRVTITADESTSTAYMELSSLRSEDTAVYYCAKAFGLASGKGPGVFD |
| | | YWGQGTLVTVSS |
| TIGIT-269- | 1548 | QVQLVQSGAEVKKPGSSVKVSCKASGGTFSQYAISWVRQAPGQGLEWMGGIIP |
| 21 | | MNYAQKFQGRVTITADESTSTAYMELSSLRSEDTAVYYCARESRTLFGVPNAFD |
| | | IWGQGTLVTVSS |
| TIGIT-471- | 2141 | EVQLLESGGGLVQPGGSLRLSCAASGFTFSNYGVSWVRQAPGKGLEWVGYINPS |
| 001 | | RGYTYYADSVKGRFTISRDNSKNTLYLQMNSLRAEDTAVYYCARSYGGGFDY |
| | | WGQGTLVTVSS |
| TIGIT-471- | 2142 | EVQLLESGGGLVQPGGSLRLSCAASGFTFVRYDMAWVRQAPGKGLEWVSTISS |
| 009 | | GGDYTYYPDSVKGRFTISRDNSKNTLYLQMNSLRAEDTAVYYCAKDTYNHFDY |
| | | WGQGTLVTVSS |
| TIGIT-471- | 2143 | EVQLLESGGGLVQPGGSLRLSCAASGFTFSKYGMSWVRQAPGKGLEWVSYINSS |
| 017 | | RGYTYYADSVKGRFTISRDNSKNTLYLQMNSLRAEDTAVYYCARSSGGGFDYW |
| | | GQGTLVTVSS |
| TIGIT-471- | 2144 | EVQLLESGGGLVQPGGSLRLSCAASGFTFSRYFMGWVRQAPGKGLEWVSEISPS |
| 025 | | GKKKYYADSVKGRFTISRDNSKNTLYLQMNSLRAEDTAVYYCAKSSFDKYNFD |
| | | YWGQGTLVTVSS |
| TIGIT-471- | 2145 | EVQLLESGGGLVQPGGSLRLSCAASGFTFHKYGMTWVRQAPGKGLEWVSAISS |
| 033 | | GGGYTYYPDSVKGRFTISRDNSKNTLYLQMNSLRAEDTAVYYCARDTYLHFDY |
| | | WGQGTLVTVSS |
| TIGIT-471- | 2146 | EVQLLESGGGLVQPGGSLRLSCAASGFTFSRYVMGWVRQAPGKGLEWVSEISPS |
| 041 | | GKKKYYADSVKGRFTISRDNSKNTLYLQMNSLRAEDTAVYYCAKSSFDKYNFD |
| | | YWGQGTLVTVSS |
| TIGIT-471- | 2147 | EVQLLESGGGLVQPGGSLRLSCAASGFTFSTYAMNWVRQAPGKGLEWVTEISPS |
| 049 | | GKKKYYADSVKGRFTISRDNSKNTLYLQMNSLRAEDTAVYYCAKSSFDKYNFD |
| | | YWGQGTLVTVSS |
| TIGIT-471- | 2148 | EVQLLESGGGLVQPGGSLRLSCAASGCTFSSYLMSWVRQAPVKGLEWVGVIWG |
| 005 | | GGGTYYADSVKGRFTISRDNSKNTLYLQMNSLRAEDTAVYYCAKGGTSFDYW |
| | | GQGTLVTVSS |
| TIGIT-471- | 2149 | EVQLLESGGGLVQPGGSLRLSCAASGFTFNAYPMTWVRQAPGKGLEWVSGITG |
| 013 | | SGGSTYYADSVKGGFTISRVNSKNTLYLQMNSLRTEDTAVYYCARDGSYSSSW |
| | | YGYWGQGTLVTVSS |
| TIGIT-471- | 2150 | EVQLLESGGGLVQPGGSLRLSCAASGFTFHKYGMACVRQAHEKGLEWVSTISSG |
| 021 | | GGYTYYPDSVKGRLTISRDNSKNTLYLQMNSLRAEDTAVYYCARDTYLHFEYW |
| | | GQGTLVTVSS |
| TIGIT-471- | 2151 | EVQLLESGGGLVQPGGSLRLSCAASGFTFHKYGMAWVRQAPGKGLEWVSTISS |
| 029 | | GGGYTYYPDSVKGRFTISRDNSKNTLYLQMNSLRAEDTAVYYCARDTYLHFDY |
| | | WGQGTLVTVSS |
| TIGIT-471- | 2152 | EVQLLESGGGLVQPGGSLRLSCAASGFTFSPYSMSWVRQAPGKGLEWVSEISPS |
| 037 | | GKKKYYADSVKGRFTISRDNSKNTLYLQMNSLRAEDTAVYYCARSSFDKYNFD |
| | | YWGQGTLVTVSS |
| TIGIT-471- | 2153 | EVQLLESGGGLVQPGGSLRLSCAASGFTFSRYFMGWVRQAPGKGLEWVSEISPS |
| 045 | | GKKKYYADSVKGRFTISRDNSKNTLYLQMNSLRAEDTAVYYCAKSSFDKYNFD |
| | | YWGQGTLVTVSS |
| TIGIT-471- | 2154 | EVQLLESGGGLVQPGGSLRLSCAASGFTFSSYFMSWVRQAPGKGLEWVGVIWG |
| 002 | | GGGTYYADSVKGRFTISRDNSKNTLYLQMNSLRAEDTAVYYCAKGGTSFDYW |
| | | GQGTLVTVSS |
| TIGIT-471- | 2155 | EVQLLESGGGLVQPGGSLRLSCAASGFTFSRYIMGWVRQAPRKGLKWVSEISLI |
| 010 | | GKKKYYADSVKGRFTISRDNSKNTLYLQMNSLRAEDTAVYYCAKSSFDKYNFD |
| | | YWGQGTLVTVSS |
| TIGIT-471- | 2156 | EVQLLESGGGLVQPGGSLRLSCAASGFTFSNYGVSWVRQAPGKGLEWVGYINR |
| 018 | | SREYTYYADSVKGRFTISRDNSKNTLYLQMNSLRAEDTAVYYCARSYGGGFDY |
| | | WGQGTLVTVSS |
| TIGIT-471- | 2157 | EVQLLESGGGLVQPGGSLRLSCAASGFTFSRYAMNWVRQAPGKGLEWVSEISPS |
| 026 | | GKKKYYADSVKGRFTISRDNSKNTLYLQMNSLRAEDTAVYYCAKSSFDKYNFD |
| | | YWGQGTLVTVSS |
| TIGIT-471- | 2158 | EVQLLESGGGLVQPGGSLRLSCAASGFTFSRYFMGWVRQAPGKGLEWVSEISPS |
| 034 | | GKKKYYAESVKGRFTISRDNSKNTLYLQMNSLRAEDTAVYYCAKSSFDKYNFD |
| | | YWGQGTLVTVSS |
| TIGIT-471- | 2159 | EVQLLESGGGLVQPGGSLRLSCAASGFTFHKYGMAWVRQAPGKGLEWVSTISG |
| 042 | | GGGYTYYPDSVKGRFTISRDNSKNTLYLQMNSLRAEDTAVYYCARDTYLHFDY |
| | | WGQGTLVTVSS |
| TIGIT-471- | 2160 | EVQLLESGGGLVQPGGSLRLSCAASGFTFSKYGVSWVRQAPGKGLEWVCYINS |
| 006 | | GSGYTYYADSVKGRFTISRDNSKNTLYLQMNSLRAEDTAVYYCARASYVHFDY |
| | | WGQGTLVTVSS |
| TIGIT-471- | 2161 | EVQLLESGGGLVQPGGSLRLSCAASGFTFSSYFMSWVRQAPGKGLECVGVIWG |
| 014 | | GGGTYYADSVKGRFTISRDNSKNTLYLQMNSLRAEDTAVYYCAKGGTSFDYW |
| | | GQGTLVTVSS |
| TIGIT-471- | 2162 | EVQLLESGGGLVQPGGSLRLSCAASGFTFSSYLMSWIRQAPGKGLEWVGVIWG |
| 022 | | GGGTYYADSVKGRFTISRDNSKNTLYLQMNSLRAEDTAVYYCAKGGTSFDYW |
| | | GQGTLVTVSS |
| TIGIT-471- | 2163 | EVQLLESGGGLVQPGGSLRLSCAASGFTFSRYVMNWVRQAPGKGLEWVSEISPS |
| 030 | | GKKKYYADSVKGRFTISRDNSKNTLYLQMNSLRAEDTAVYYCAKSSFDKYNFD |
| | | YWGQGTLVTVSS |
| TIGIT-471- | 2164 | EVQLLESGGGLVQPGGSLRLSCAASGFTFSNYGVSWVRQAPGKGLEWVGYINPS |
| 038 | | RGYTYYADSVKGRFTISRDNSKNTLYLQMNSLRAEDTAVYYCARSYGGGFDY |
| | | WGQGTLVTVSS |
| TIGIT-471- | 2165 | EVQLLESGGGLVQPGGSLRLSCAASGFTFEDETMSWVRQAPGKGLEWVSAISGS |
| 046 | | GGGTSYADSVKGRFTISRDNSKNTLYLQMNSLRAEDTAVYYCARDVIAGPFDY |
| | | WGQGTLVTVSS |
| TIGIT-471- | 2166 | EVQLLESGGGLVQPGGSLRLSCAASGFTFSNYGVSWVRQAPGKGLEWVSWISP |
| 003 | | HGALTYYADSVKGRFTISRDNSKNTLYLQMNSLKAEDTAVYYCAKGRRRFDY |
| | | WGQGTLVTVSS |
| TIGIT-471- | 2167 | EVQLLESGGGLVQPGGSLRLSCAASGFTFSNYGVSWVRQAPGKGLEWVSSIDW |
| 011 | | HGWVTYYADSVKGRFTISRDNSKNTLYLQMNSLRAEDTAVYYCVKNALRFDY |
| | | WGQGTLVTVSS |
| TIGIT-471- | 2168 | EVQLLESGGGLVQPGGSLRLSCAASGFTFSNYGVSWVRQAHGKGLEWVVYINP |
| 019 | | SRGYTYYADSVKGRFSISRDNSKNTLYLQMNSLRAEDTAVYYCARSYGGGFDY |
| | | WGQGTLVTVSS |
| TIGIT-471- | 2169 | EVQLLESGGGLVQPGGSLRLSCAASGFTFSNYGVSWVRQAPGKGLEWVSWISP |
| 027 | | HGALTYYADSVKGRFTISRDNSKNTLYLQMNSLKAEDTAVYYCAKGRRRFDY |
| | | WGQGTLVTVSS |
| TIGIT-471- | 2170 | EVQLLESGGGLVQPGGSLRLSCAASGFTFNAYPMTWVRQAPGKGLEWVSAITG |
| 035 | | SGGSTYYADSVKGRFTISRDNSKNTLYLQMNSLRAEDTAVYYCARVWRNHLDY |
| | | WGQGTLVTVSS |
| TIGIT-471- | 2171 | EVQLLESGGGLVQPGGSLRLSCAASGFTFEHNDMHWVRQAPGKGLEWVSGISP |
| 043 | | SGGITTYADSVKGRFTISRDNSKNTLYLQMNSLRAEDTAVYYCAKQAPGEKWL |
| | | ARGRLDYWGQGTLVTVSS |
| TIGIT-471- | 2172 | EVQLLESGGGLVQPGGSLRLSCAASDLHSRSYVMGWVRQAPGKGLEWVSEISR |
| 007 | | SGKKKYYADSVKGRFTISRDNSKNTLYLQMNSLRAEDTAVYYCAKSSFGEYNF |
| | | DYWGQGTLVTVSS |
| TIGIT-471- | 2173 | EVQLLESGGGLVQPGGSLRLSCAASGFTFDKYDMAWVRQAPGKGLEWVSTICS |
| 015 | | GGDYTYYPDSVKGRFTISRDNSKNTLYLQMNSLRAEDTAVYYCARDTYIHFDY |
| | | WGQGTLVTVSS |
| TIGIT-471- | 2174 | EVQLLESGGGLVQPGGSLRLSCAASGFTFNKYPMMWVRQAPGKGLEWVSTIGP |
| 023 | | SGTSTYYADSVKGRFTISRDNSKNTLYLQMNSLRAEDTAVYYCARRSYFRRFDY |
| | | WGQGTLVTVSS |
| TIGIT-471- | 2175 | EVQLLESGGGLVQPGGSLRLSCAASGFTFSRYAMNWVRQAPGKGLEWVSEISPS |
| 031 | | GKKKYYADSVKGRFTISRDNSKNTLYLQMNSLRAEDTAVYYCAKSSFDKYNFD |
| | | YWGQGTLVTVSS |
| TIGIT-471- | 2176 | EVQLLESGGGLVQPGGSLRLSCAASGFTFNADPMSWVRQAPGKGLEWVSAITG |
| 039 | | SGGSTYYADSVKGRFTISRDNSKNTLYLQMNSLRAEDTAVYYCARDGSYSSSW |
| | | YGYWGQGTLVTVSS |
| TIGIT-471- | 2177 | EVQLLESGGGLVQPGGSLRLSCAASGFTFEVYTMAWVRQAPGKGLEWVSSIHP |
| 047 | | KGYPTRYADSVKGRFTISRDNSKNTLYLQMNSLRAEDTAVYYCAKGWFGNFDY |
| | | WGQGTLVTVSS |
| TIGIT-471- | 2178 | EVQLLESGGGLVQPGGSLRLSCAASGFTFHKYGMTWVRQAPGKGLEWVSSISS |
| 004 | | GGGYTYYPDSVKGRFTISRDNSKNTLYLQMNSLRAEDTAVYYCARDTYLHFDY |
| | | WGQGTLVTVSS |
| TIGIT-471- | 2179 | EVQLLESGGGLVQPGGSLRLSCAASGFTFNKYPMMWVRQAPGKGLEWVSGITR |
| 012 | | SGSTNYRDSVKGRFTISRDNSKNTLYLQMNSLRAEDTAVYYCAKKLSNGFDYW |
| | | GQGTLVTVSS |
| TIGIT-471- | 2180 | EVQLLESGGGLVQPGGSLRLSCAASASSVSRYVMGCVGQARGKGLKWVSEISRI |
| 020 | | GKKKCYADSVKGRFAISRDNCKNTLYLQMNSMRAEDTAVYYCEKSSFDKYNF |
| | | DYWGQGTLVTVSS |
| TIGIT-471- | 2181 | EVQLLESGGGLVQPGGSLRLSCAASGFTFPVYNMAWVRQAPGKGLEWVSGIYP |
| 028 | | SGGSTVYADSVKGRFTISRDNSKNTLYLQMNSLRAEDTAVYYCARHRAGSSGW |
| | | YSDYWGQGTLVTVSS |
| TIGIT-471- | 2182 | EVQLLESGGGLVQPGGSLRLSCAASGFTFSSYFMSWVRQAPGKGLEWVGVIWG |
| 036 | | GGGTYYADSVKGRFTIYRDNSKNTLYLQMNSLRAEDTAVYYCAKGGTSFDYW |
| | | GQGTLVTVSS |
| TIGIT-471- | 2183 | EVQLLESGGGLVQPGGSLRLSCAASGFTFSRYFMGWVRQAPGKGLEWVSEISPS |
| 044 | | GKKKYYADSVKGRFTISRDNSKNTLYLQMNSLRAEDTAVYYCAKSSFDKYNFH |
| | | YWGQGTLVTVSS |
| TIGIT-471- | 2184 | EVQLLESGGGLVQPGGSLRLSCAASGFTFEPVIMGWVRQAPGKGLEWVSSISPN |
| 008 | | GWDTYYADSVKGRFTISRDNSKNTLYLQMNSLRAEDTAVYYCATETSPNDYW |
| | | GQGTLVTVSS |
| TIGIT-471- | 2185 | EVQLLESGGGLVQPGGSLRLSCAASGFTFHKYGMAWVRQAPGKGLEWVSTISS |
| 016 | | GGGYTYYPDSVKGRFTISRDNSKNTLYLQMNSLRAEDTAVYHCARDTYLHFDY |
| | | WGQGTLVTVSS |
| TIGIT-471- | 2186 | EVQLLESGGGLVQPGGSLRLSCAASGFTFEPVIMGWVRQAPGKGLEWVSSISPN |
| 024 | | GWDTYYADSVKGRFTISRDNSKNTLYLQMNSLRAEDTAVYYCATETSPNDYW |
| | | GQGTLVTVSS |
| TIGIT-471- | 2187 | EVQLLESGGGLVQPGGSLRLSCAASGFTFHKYGMAWVRQAPGKGLEWVSTISS |
| 032 | | GGGYTYYPDSVKGRFTISRDNSKNTLYLQMNSLRAEDTAVYYCARDTYLHFDY |
| | | WGQGTLVTVSS |
| TIGIT-471- | 2188 | EVQLLESGGGLVQPGGSLRLSCAASGFTFHKYGMAWVRQAPGKGLEWVSTISS |
| 040 | | GGGYTYYPDSVKGRFTISRDNSKNTLYLQMNSLRAEDTAVYYCARDTYLHFDY |
| | | WGQGTLVTVSS |
| TIGIT-471- | 2189 | EVQLLESGGGLVQPGGSLRLSCAASGFTFSNYGVSWVRQAPGKGLEWVGYINPS |
| 048 | | RGYTYYADSVKGRFTISRDNSKNTLYLQMNSLRAEDTAVYYCARSYGGGFDY |
| | | WGQGTLVTVSS |

TABLE 15
Variable Domain of Light Chain Sequences

| | SEQ | |
|---|---|---|
| Variant | ID NO | Variable Domain of Light Chain Sequence |
| TIGIT-211-1 | 1549 | DIQMTQSPSSLSASVGDRVTITCRSSQSLVHSTGNTYLHWYQQKPGKAPKLLIYA |
| | | ASDLESGVPSRFSGSGSGTDFTLTISSLQPEDFATYYCQQGHTLPWTFGQGTKVEI |
| | | K |
| TIGIT-211-2 | 1550 | DIQMTQSPSSLSASVGDRVTITCRTSQDIGNYLNWYQQKPGKAPKLLIYPKHNRP |
| | | PGVPSRFSGSGSGTDFTLTISSLQPEDFATYYCQQSYNSPWTFGQGTKVEIK |
| TIGIT-211-3 | 1551 | DIQMTQSPSSLSASVGDRVTITCRSSQSLVHSTGNTYLHWYQQKPGKAPKLLIYA |
| | | ASDLESGVPSRFSGSGSGTDFTLTISSLQPEDFATYYCQQGHTLPWTFGQGTKVEI |
| | | K |
| TIGIT-211-4 | 1552 | DIQMTQSPSSLSASVGDRVTITCRSSQSLVHSTGNTYLHWYQQKPGKAPKLLIYA |
| | | ASDLESGVPSRFSGSGSGTDFTLTISSLQPEDFATYYCQQGHTLPWTFGQGTKVEI |
| | | K |
| TIGIT-211-5 | 1553 | DIQMTQSPSSLSASVGDRVTITCRSSQSLVHSTGNTYLHWYQQKPGKAPKLLIYA |
| | | ASDLESGVPSRFSGSGSGTDFTLTISSLQPEDFATYYCQQGHTLPWTFGQGTKVEI |
| | | K |
| TIGIT-211-6 | 1554 | DIQMTQSPSSLSASVGDRVTITCRSSQSLVHSTGNTYLHWYQQKPGKAPKLLIYA |
| | | ASDLESGVPSRFSGSGSGTDFTLTISSLQPEDFATYYCQQGHTLPWTFGQGTKVEI |
| | | K |
| TIGIT-211-7 | 1555 | DIQMTQSPSSLSASVGDRVTITCSGDKLRNKYASWYQQKPGKAPKLLIYGQHNR |
| | | PSGVPSRFSGSGSGTDFTLTISSLQPEDFATYYCQGSYYSGSGWYYAFGQGTKVE |
| | | IK |
| TIGIT-211-8 | 1556 | DIQMTQSPSSLSASVGDRVTITCRSSQSLVHSTGNTYLHWYQQKPGKAPKLLIYA |
| | | ASDLESGVPSRFSGSGSGTDFTLTISSLQPEDFATYYCQQGHTLPWTFGQGTKVEI |
| | | K |
| TIGIT-211-9 | 1557 | DIQMTQSPSSLSASVGDRVTITCRSSQSLVHSTGNTYLHWYQQKPGKAPKLLIYA |
| | | ASDLESGVPSRFSGSGSGTDFTLTISSLQPEDFATYYCQQGHTLPWTFGQGTKVEI |
| | | K |
| TIGIT-211- | 1558 | DIQMTQSPSSLSASVGDRVTITCRSSQSLVHSTGNTYLHWYQQKPGKAPKLLIYA |
| 10 | | ASDLESGVPSRFSGSGSGTDFTLTISSLQPEDFATYYCQQGHTLPWTFGQGTKVEI |
| | | K |
| TIGIT-211- | 1559 | DIQMTQSPSSLSASVGDRVTITCRSSQSLVHSTGNTYLHWYQQKPGKAPKLLIYA |
| 11 | | ASDLESGVPSRFSGSGSGTDFTLTISSLQPEDFATYYCQQGHTLPWTFGQGTKVEI |
| | | K |
| TIGIT-211- | 1560 | DIQMTQSPSSLSASVGDRVTITCSGDKLGHTYTSWYQQKPGKAPKLLIYYTSSLH |
| 12 | | SGVPSRFSGSGSGTDFTLTISSLQPEDFATYYCATRAVRGNPHVLFGQGTKVEIK |
| TIGIT-211- | 1561 | DIQMTQSPSSLSASVGDRVTITCRASQSIREYLHWYQQKPGKAPKLLIYFGSELR |
| 13 | | KGVPSRFSGSGSGTDFTLTISSLQPEDFATYYCGQGVLWPATFGQGTKVEIK |
| TIGIT-211- | 1562 | DIQMTQSPSSLSASVGDRVTITCSGDTLGGKYAWWYQQKPGKAPKLLIYQNDK |
| 14 | | RPSGVPSRFSGSGSGTDFTLTISSLQPEDFATYYCHQWSSYPTFGQGTKVEIK |
| TIGIT-211- | 1563 | DIQMTQSPSSLSASVGDRVTITCQSSQSVYSNNELSWYQQKPGKAPKLLIYGTSY |
| 15 | | RYSGVPSRFSGSGSGTDFTLTISSLQPEDFATYYCSSWAGSRSGTVFGQGTKVEIK |
| TIGIT-211- | 1564 | DIQMTQSPSSLSASVGDRVTITCSGDKLGHTYTSWYQQKPGKAPKLLIYRTSWL |
| 16 | | QSGVPSRFSGSGSGTDFTLTISSLQPEDFATYYCQQYHSYPPTFGQGTKVEIK |
| TIGIT-211- | 1565 | DIQMTQSPSSLSASVGDRVTITCRASQTIERRLNWYQQKPGKAPKLLIYQNDKRP |
| 17 | | SGVPSRFSGSGSGTDFTLTISSLQPEDFATYYCQQSYSIPPTFGQGTKVEIK |
| TIGIT-211- | 1566 | DIQMTQSPSSLSASVGDRVTITCSGDKLGDKYTSWYQQKPGKAPKLLIYHTSRL |
| 18 | | QDGVPSRFSGSGSGTDFTLTISSLQPEDFATYYCQQSYNLPLTFGQGTKVEIK |
| TIGIT-211- | 1567 | DIQMTQSPSSLSASVGDRVTITCRSSQSLVHSTGNTYLHWYQQKPGKAPKLLIYA |
| 19 | | ASDLESGVPSRFSGSGSGTDFTLTISSLQPEDFATYYCQQGHTLPWTFGQGTKVEI |
| | | K |
| TIGIT-211- | 1568 | DIQMTQSPSSLSASVGDRVTITCRSSQSLVHSTGNTYLHWYQQKPGKAPKLLIYA |
| 20 | | ASDLESGVPSRFSGSGSGTDFTLTISSLQPEDFATYYCQQGHTLPWTFGQGTKVEI |
| | | K |
| TIGIT-211- | 1569 | DIQMTQSPSSLSASVGDRVTITCRSSQSLVHSTGNTYLHWYQQKPGKAPKLLIYA |
| 21 | | ASDLESGVPSRFSGSGSGTDFTLTISSLQPEDFATYYCQQGHTLPWTFGQGTKVEI |
| | | K |
| TIGIT-211- | 1570 | DIQMTQSPSSLSASVGDRVTITCRASQGVRTSLAWYQQKPGKAPKLLIYAKNNR |
| 22 | | PSGVPSRFSGSGSGTDFTLTISSLQPEDFATYYCQQSYHTPQTFGQGTKVEIK |
| TIGIT-211- | 1571 | DIQMTQSPSSLSASVGDRVTITCRSSQSLVHSTGNTYLHWYQQKPGKAPKLLIYA |
| 23 | | ASDLESGVPSRFSGSGSGTDFTLTISSLQPEDFATYYCQQGHTLPWTFGQGTKVEI |
| | | K |
| TIGIT-211- | 1572 | DIQMTQSPSSLSASVGDRVTITCRSSQSLVHSTGNTYLHWYQQKPGKAPKLLIYA |
| 24 | | ASDLESGVPSRFSGSGSGTDFTLTISSLQPEDFATYYCQQGHTLPWTFGQGTKVEI |
| | | K |
| TIGIT-211- | 1573 | DIQMTQSPSSLSASVGDRVTITCRASQTIERRLNWYQQKPGKAPKLLIYAKNNRP |
| 25 | | SGVPSRFSGSGSGTDFTLTISSLQPEDFATYYCQQTALVPYTFGQGTKVEIK |
| TIGIT-211- | 1574 | DIQMTQSPSSLSASVGDRVTITCRASQTIGDYLNWYQQKPGKAPKLLIYGASSRA |
| 26 | | TGVPSRFSGSGSGTDFTLTISSLQPEDFATYYCAQGAALPRTFGQGTKVEIK |
| TIGIT-211- | 1575 | DIQMTQSPSSLSASVGDRVTITCRSSQSLVHSTGNTYLHWYQQKPGKAPKLLIYA |
| 27 | | ASDLESGVPSRFSGSGSGTDFTLTISSLQPEDFATYYCQQGHTLPWTFGQGTKVEI |
| | | K |
| TIGIT-211- | 1576 | DIQMTQSPSSLSASVGDRVTITCQGASLRNYYASWYQQKPGKAPKLLIYDTSKV |
| 28 | | ASGVPSRFSGSGSGTDFTLTISSLQPEDFATYYCFQGSHIPYTFGQGTKVEIK |
| TIGIT-211- | 1577 | DIQMTQSPSSLSASVGDRVTITCRASQSISNNLNWYQQKPGKAPKLLIYAKNNRP |
| 29 | | SGVPSRFSGSGSGTDFTLTISSLQPEDFATYYCQQSYTTPPTFGQGTKVEIK |
| TIGIT-211- | 1578 | DIQMTQSPSSLSASVGDRVTITCRASQPIGPDLLWYQQKPGKAPKLLIYRKSNRPS |
| 30 | | GVPSRFSGSGSGTDFTLTISSLQPEDFATYYCQQSYSTPYTFGQGTKVEIK |
| TIGIT-211- | 1579 | DIQMTQSPSSLSASVGDRVTITCRASQSIRRFLNWYQQKPGKAPKLLIYWASDRE |
| 31 | | SGVPSRFSGSGSGTDFTLTISSLQPEDFATYYCQQTATWPFTFGQGTKVEIK |
| TIGIT-211- | 1580 | DIQMTQSPSSLSASVGDRVTITCRSSQSLVHSTGNTYLHWYQQKPGKAPKLLIYA |
| 32 | | ASDLESGVPSRFSGSGSGTDFTLTISSLQPEDFATYYCQQGHTLPWTFGQGTKVEI |
| | | K |
| TIGIT-211- | 1581 | DIQMTQSPSSLSASVGDRVTITCRSSQSLVHSTGNTYLHWYQQKPGKAPKLLIYA |
| 33 | | ASDLESGVPSRFSGSGSGTDFTLTISSLQPEDFATYYCQQGHTLPWTFGQGTKVEI |
| | | K |
| TIGIT-211- | 1582 | DIQMTQSPSSLSASVGDRVTITCRANQNIGNFLNWYQQKPGKAPKLLIYQDFKRP |
| 34 | | SGVPSRFSGSGSGTDFTLTISSLQPEDFATYYCHQRSSYPWTFGQGTKVEIK |
| TIGIT-211- | 1583 | DIQMTQSPSSLSASVGDRVTITCSGNKLGDKYASWYQQKPGKAPKLLIYRTSWL |
| 35 | | QSGVPSRFSGSGSGTDFTLTISSLQPEDFATYYCVARAVRGNPHVLFGQGTKVEI |
| | | K |
| TIGIT-211- | 1584 | DIQMTQSPSSLSASVGDRVTITCRSSQSLVHSTGNTYLHWYQQKPGKAPKLLIYA |
| 36 | | ASDLESGVPSRFSGSGSGTDFTLTISSLQPEDFATYYCQQGHTLPWTFGQGTKVEI |
| | | K |
| TIGIT-211- | 1585 | DIQMTQSPSSLSASVGDRVTITCRSSQSLVHSTGNTYLHWYQQKPGKAPKLLIYA |
| 37 | | ASDLESGVPSRFSGSGSGTDFTLTISSLQPEDFATYYCQQGHTLPWTFGQGTKVEI |
| | | K |
| TIGIT-211- | 1586 | DIQMTQSPSSLSASVGDRVTITCRSSQSLVHSTGNTYLHWYQQKPGKAPKLLIYA |
| 38 | | ASDLESGVPSRFSGSGSGTDFTLTISSLQPEDFATYYCQQGHTLPWTFGQGTKVEI |
| | | K |
| TIGIT-211- | 1587 | DIQMTQSPSSLSASVGDRVTITCRSSQSLVHSTGNTYLHWYQQKPGKAPKLLIYA |
| 39 | | ASDLESGVPSRFSGSGSGTDFTLTISSLQPEDFATYYCQQGHTLPWTFGQGTKVEI |
| | | K |
| TIGIT-211- | 1588 | DIQMTQSPSSLSASVGDRVTITCRASQDIGNFLNWYQQKPGKAPKLLIYRTSWLQ |
| 40 | | SGVPSRFSGSGSGTDFTLTISSLQPEDFATYYCQQRSSYPPTFGQGTKVEIK |
| TIGIT-211- | 1589 | DIQMTQSPSSLSASVGDRVTITCRSSQSLVHSTGNTYLHWYQQKPGKAPKLLIYA |
| 41 | | ASDLESGVPSRFSGSGSGTDFTLTISSLQPEDFATYYCQQGHTLPWTFGQGTKVEI |
| | | K |
| TIGIT-211- | 1590 | DIQMTQSPSSLSASVGDRVTITCRASQGVRTSLAWYQQKPGKAPKLLIYGKNIRP |
| 42 | | SGVPSRFSGSGSGTDFTLTISSLQPEDFATYYCQQSYSFPLTFGQGTKVEIK |
| TIGIT-211- | 1591 | DIQMTQSPSSLSASVGDRVTITCRASQSIRRYLNWYQQKPGKAPKLLIYWASDRE |
| 43 | | SGVPSRFSGSGSGTDFTLTISSLQPEDFATYYCQQSFSTPLTFGQGTKVEIK |
| TIGIT-211- | 1592 | DIQMTQSPSSLSASVGDRVTITCRSSQSLVHSTGNTYLHWYQQKPGKAPKLLIYA |
| 44 | | ASDLESGVPSRFSGSGSGTDFTLTISSLQPEDFATYYCQQGHTLPWTFGQGTKVEI |
| | | K |
| TIGIT-211- | 1593 | DIQMTQSPSSLSASVGDRVTITCRASQSIRRYLNWYQQKPGKAPKLLIYDASNLQ |
| 45 | | SGVPSRFSGSGSGTDFTLTISSLQPEDFATYYCQQSYDFPRTFGQGTKVEIK |
| TIGIT-211- | 1594 | DIQMTQSPSSLSASVGDRVTITCRSSQSLVHSTGNTYLHWYQQKPGKAPKLLIYA |
| 46 | | ASDLESGVPSRFSGSGSGTDFTLTISSLQPEDFATYYCQQGHTLPWTFGQGTKVEI |
| | | K |
| TIGIT-211- | 1595 | DIQMTQSPSSLSASVGDRVTITCRSSQSLVHSTGNTYLHWYQQKPGKAPKLLIYA |
| 47 | | ASDLESGVPSRFSGSGSGTDFTLTISSLQPEDFATYYCQQGHTLPWTFGQGTKVEI |
| | | K |
| TIGIT-211- | 1596 | DIQMTQSPSSLSASVGDRVTITCRSSQSLVHSTGNTYLHWYQQKPGKAPKLLIYA |
| 48 | | ASDLESGVPSRFSGSGSGTDFTLTISSLQPEDFATYYCQQGHTLPWTFGQGTKVEI |
| | | K |
| TIGIT-211- | 1597 | DIQMTQSPSSLSASVGDRVTITCRSSQSLVHSTGNTYLHWYQQKPGKAPKLLIYA |
| 49 | | ASDLESGVPSRFSGSGSGTDFTLTISSLQPEDFATYYCQQGHTLPWTFGQGTKVEI |
| | | K |
| TIGIT-211- | 1598 | DIQMTQSPSSLSASVGDRVTITCRSSQSLVHSTGNTYLHWYQQKPGKAPKLLIYA |
| 50 | | ASDLESGVPSRFSGSGSGTDFTLTISSLQPEDFATYYCQQGHTLPWTFGQGTKVEI |
| | | K |
| TIGIT-211- | 1599 | DIQMTQSPSSLSASVGDRVTITCRASQGVRTSLAWYQQKPGKAPKLLIYAKNNR |
| 51 | | PSGVPSRFSGSGSGTDFTLTISSLQPEDFATYYCQQSYSAPYTFGQGTKVEIK |
| TIGIT-211- | 1600 | DIQMTQSPSSLSASVGDRVTITCRSSQSLVHSTGNTYLHWYQQKPGKAPKLLIYA |
| 52 | | ASDLESGVPSRFSGSGSGTDFTLTISSLQPEDFATYYCQQGHTLPWTFGQGTKVEI |
| | | K |
| TIGIT-211- | 1601 | DIQMTQSPSSLSASVGDRVTITCRASQTIGDYLNWYQQKPGKAPKLLIYGQHNRP |
| 53 | | SGVPSRFSGSGSGTDFTLTISSLQPEDFATYYCQQSFSIPWTFGQGTKVEIK |
| TIGIT-211- | 1602 | DIQMTQSPSSLSASVGDRVTITCKASDHIGKFLTWYQQKPGKAPKLLIYAASKLA |
| 54 | | SGVPSRFSGSGSGTDFTLTISSLQPEDFATYYCQQVVWRPFTFGQGTKVEIK |
| TIGIT-211- | 1603 | DIQMTQSPSSLSASVGDRVTITCRASQTIGDYLNWYQQKPGKAPKLLIYHDNKRP |
| 55 | | SGVPSRFSGSGSGTDFTLTISSLQPEDFATYYCQQDAFHPPTFGQGTKVEIK |
| TIGIT-211- | 1604 | DIQMTQSPSSLSASVGDRVTITCRSSQSLVHSTGNTYLHWYQQKPGKAPKLLIYA |
| 56 | | ASDLESGVPSRFSGSGSGTDFTLTISSLQPEDFATYYCQQGHTLPWTFGQGTKVEI |
| | | K |
| TIGIT-211- | 1605 | DIQMTQSPSSLSASVGDRVTITCRSSQSLVHSTGNTYLHWYQQKPGKAPKLLIYG |
| 57 | | KNIRPSGVPSRFSGSGSGTDFTLTISSLQPEDFATYYCQQSYTTPWTFGQGTKVEI |
| | | K |
| TIGIT-211- | 1606 | DIQMTQSPSSLSASVGDRVTITCRSSQSLVHSTGNTYLHWYQQKPGKAPKLLIYA |
| 58 | | ASDLESGVPSRFSGSGSGTDFTLTISSLQPEDFATYYCQQGHTLPWTFGQGTKVEI |
| | | K |
| TIGIT-211- | 1607 | DIQMTQSPSSLSASVGDRVTITCRSSQSLVHSTGNTYLHWYQQKPGKAPKLLIYA |
| 59 | | ASDLESGVPSRFSGSGSGTDFTLTISSLQPEDFATYYCQQGHTLPWTFGQGTKVEI |
| | | K |
| TIGIT-211- | 1608 | DIQMTQSPSSLSASVGDRVTITCRSSQSLVHSTGNTYLHWYQQKPGKAPKLLIYA |
| 60 | | ASDLESGVPSRFSGSGSGTDFTLTISSLQPEDFATYYCQQGHTLPWTFGQGTKVEI |
| | | K |
| TIGIT-211- | 1609 | DIQMTQSPSSLSASVGDRVTITCRSSQSLVHSTGNTYLHWYQQKPGKAPKLLIYA |
| 61 | | ASDLESGVPSRFSGSGSGTDFTLTISSLQPEDFATYYCQQGHTLPWTFGQGTKVEI |
| | | K |
| TIGIT-211- | 1610 | DIQMTQSPSSLSASVGDRVTITCRSSQSLVHSTGNTYLHWYQQKPGKAPKLLIYA |
| 62 | | ASDLESGVPSRFSGSGSGTDFTLTISSLQPEDFATYYCQQGHTLPWTFGQGTKVEI |
| | | K |
| TIGIT-211- | 1611 | DIQMTQSPSSLSASVGDRVTITCRSSQSLVHSTGNTYLHWYQQKPGKAPKLLIYA |
| 63 | | ASDLESGVPSRFSGSGSGTDFTLTISSLQPEDFATYYCQQGHTLPWTFGQGTKVEI |
| | | K |
| TIGIT-211- | 1612 | DIQMTQSPSSLSASVGDRVTITCRSSQSLVHSTGNTYLHWYQQKPGKAPKLLIYA |
| 64 | | ASDLESGVPSRFSGSGSGTDFTLTISSLQPEDFATYYCQQGHTLPWTFGQGTKVEI |
| | | K |
| TIGIT-211- | 1613 | DIQMTQSPSSLSASVGDRVTITCRSSQSLVHSTGNTYLHWYQQKPGKAPKLLIYA |
| 65 | | ASDLESGVPSRFSGSGSGTDFTLTISSLQPEDFATYYCQQGHTLPWTFGQGTKVEI |
| | | K |
| TIGIT-211- | 1614 | DIQMTQSPSSLSASVGDRVTITCRSSQSLVHSTGNTYLHWYQQKPGKAPKLLIYA |
| 66 | | ASDLESGVPSRFSGSGSGTDFTLTISSLQPEDFATYYCQQGHTLPWTFGQGTKVEI |
| | | K |
| TIGIT-211- | 1615 | DIQMTQSPSSLSASVGDRVTITCRSSQSLVHSTGNTYLHWYQQKPGKAPKLLIYA |
| 67 | | ASDLESGVPSRFSGSGSGTDFTLTISSLQPEDFATYYCQQGHTLPWTFGQGTKVEI |
| | | K |
| TIGIT-211- | 1616 | DIQMTQSPSSLSASVGDRVTITCRSSQSLVHSTGNTYLHWYQQKPGKAPKLLIYA |
| 68 | | ASDLESGVPSRFSGSGSGTDFTLTISSLQPEDFATYYCQQGHTLPWTFGQGTKVEI |
| | | K |
| TIGIT-211- | 1617 | DIQMTQSPSSLSASVGDRVTITCRASQNIRSYLNWYQQKPGKAPKLLIYGASTLQ |
| 69 | | SGVPSRFSGSGSGTDFTLTISSLQPEDFATYYCQQSYENPLTFGQGTKVEIK |
| TIGIT-211- | 1618 | DIQMTQSPSSLSASVGDRVTITCRSSQSLVHSTGNTYLHWYQQKPGKAPKLLIYA |
| 70 | | ASDLESGVPSRFSGSGSGTDFTLTISSLQPEDFATYYCQQGHTLPWTFGQGTKVEI |
| | | K |
| TIGIT-211- | 1619 | DIQMTQSPSSLSASVGDRVTITCRSSQSLVHSTGNTYLHWYQQKPGKAPKLLIYA |
| 71 | | ASDLESGVPSRFSGSGSGTDFTLTISSLQPEDFATYYCQQGHTLPWTFGQGTKVEI |
| | | K |
| TIGIT-211- | 1620 | DIQMTQSPSSLSASVGDRVTITCRASHNINSYLNWYQQKPGKAPKLLIYGKNIRP |
| 72 | | SGVPSRFSGSGSGTDFTLTISSLQPEDFATYYCQQSYIIPPTFGQGTKVEIK |
| TIGIT-211- | 1621 | DIQMTQSPSSLSASVGDRVTITCRSSQSLVHSTGNTYLHWYQQKPGKAPKLLIYA |
| 73 | | ASDLESGVPSRFSGSGSGTDFTLTISSLQPEDFATYYCQQGHTLPWTFGQGTKVEI |
| | | K |
| TIGIT-211- | 1622 | DIQMTQSPSSLSASVGDRVTITCRSSQSLVHSTGNTYLHWYQQKPGKAPKLLIYA |
| 74 | | ASDLESGVPSRFSGSGSGTDFTLTISSLQPEDFATYYCQQGHTLPWTFGQGTKVEI |
| | | K |
| TIGIT-211- | 1623 | DIQMTQSPSSLSASVGDRVTITCRSSQSLVHSTGNTYLHWYQQKPGKAPKLLIYA |
| 75 | | ASDLESGVPSRFSGSGSGTDFTLTISSLQPEDFATYYCQQGHTLPWTFGQGTKVEI |
| | | K |
| TIGIT-211- | 1624 | DIQMTQSPSSLSASVGDRVTITCRSSQSLVHSTGNTYLHWYQQKPGKAPKLLIYA |
| 76 | | ASDLESGVPSRFSGSGSGTDFTLTISSLQPEDFATYYCQQGHTLPWTFGQGTKVEI |
| | | K |
| TIGIT-211- | 1625 | DIQMTQSPSSLSASVGDRVTITCRASQSVRSYLNWYQQKPGKAPKLLIYAASSLY |
| 77 | | SGVPSRFSGSGSGTDFTLTISSLQPEDFATYYCQQYASVPVTFGQGTKVEIK |
| TIGIT-211- | 1626 | DIQMTQSPSSLSASVGDRVTITCRSSQSLVHSTGNTYLHWYQQKPGKAPKLLIYA |
| 78 | | ASDLESGVPSRFSGSGSGTDFTLTISSLQPEDFATYYCQQGHTLPWTFGQGTKVEI |
| | | K |
| TIGIT-211- | 1627 | DIQMTQSPSSLSASVGDRVTITCRASQSVRSYLNWYQQKPGKAPKLLIYAATTLQ |
| 79 | | SGVPSRFSGSGSGTDFTLTISSLQPEDFATYYCQQSYIIPPTFGQGTKVEIK |
| TIGIT-211- | 1628 | DIQMTQSPSSLSASVGDRVTITCRASQGVRTSLAWYQQKPGKAPKLLIYGKNIRP |
| 80 | | SGVPSRFSGSGSGTDFTLTISSLQPEDFATYYCQQGYRWPVTFGQGTKVEIK |
| TIGIT-211- | 1629 | DIQMTQSPSSLSASVGDRVTITCRSSQSLVHSTGNTYLHWYQQKPGKAPKLLIYA |
| 81 | | ASDLESGVPSRFSGSGSGTDFTLTISSLQPEDFATYYCQQGHTLPWTFGQGTKVEI |
| | | K |
| TIGIT-211- | 1630 | DIQMTQSPSSLSASVGDRVTITCRSSQSLVHSTGNTYLHWYQQKPGKAPKLLIYA |
| 82 | | ASDLESGVPSRFSGSGSGTDFTLTISSLQPEDFATYYCQQGHTLPWTFGQGTKVEI |
| | | K |
| TIGIT-211- | 1631 | DIQMTQSPSSLSASVGDRVTITCSGDKLGDKYTSWYQQKPGKAPKLLIYGASSR |
| 83 | | ATGVPSRFSGSGSGTDFTLTISSLQPEDFATYYCMSRSIWGNPHVLFGQGTKVEIK |
| TIGIT-211- | 1632 | DIQMTQSPSSLSASVGDRVTITCSGDKLGHTYTSWYQQKPGKAPKLLIYYTSSLH |
| 84 | | SGVPSRFSGSGSGTDFTLTISSLQPEDFATYYCATRAVRGNPHVLFGQGTKVEIK |
| TIGIT-211- | 1633 | DIQMTQSPSSLSASVGDRVTITCRSSQSLVHSTGNTYLHWYQQKPGKAPKLLIYA |
| 85 | | ASDLESGVPSRFSGSGSGTDFTLTISSLQPEDFATYYCQQGHTLPWTFGQGTKVEI |
| | | K |
| TIGIT-211- | 1634 | DIQMTQSPSSLSASVGDRVTITCRSSQSLVHSTGNTYLHWYQQKPGKAPKLLIYA |
| 86 | | ASDLESGVPSRFSGSGSGTDFTLTISSLQPEDFATYYCQQGHTLPWTFGQGTKVEI |
| | | K |
| TIGIT-211- | 1635 | DIQMTQSPSSLSASVGDRVTITCRASQTIGDYLNWYQQKPGKAPKLLIYQDFKRP |
| 87 | | SGVPSRFSGSGSGTDFTLTISSLQPEDFATYYCQQYHDFPLTFGQGTKVEIK |
| TIGIT-211- | 1636 | DIQMTQSPSSLSASVGDRVTITCRSSQSLVHSTGNTYLHWYQQKPGKAPKLLIYA |
| 88 | | ASDLESGVPSRFSGSGSGTDFTLTISSLQPEDFATYYCQQGHTLPWTFGQGTKVEI |
| | | K |
| TIGIT-211- | 1637 | DIQMTQSPSSLSASVGDRVTITCRSSQSLVHSTGNTYLHWYQQKPGKAPKLLIYA |
| 89 | | ASDLESGVPSRFSGSGSGTDFTLTISSLQPEDFATYYCQQGHTLPWTFGQGTKVEI |
| | | K |
| TIGIT-211- | 1638 | DIQMTQSPSSLSASVGDRVTITCSGDRLGEKYVSWYQQKPGKAPKLLIYGTTSLE |
| 90 | | SGVPSRFSGSGSGTDFTLTISSLQPEDFATYYCQQGYTLPWTFGQGTKVEIK |
| TIGIT-211- | 1639 | DIQMTQSPSSLSASVGDRVTITCRASQSIREYLHWYQQKPGKAPKLLIYFGSELR |
| 91 | | KGVPSRFSGSGSGTDFTLTISSLQPEDFATYYCQNGHSFPLTFGQGTKVEIK |
| TIGIT-211- | 1640 | DIQMTQSPSSLSASVGDRVTITCRSSQSLVHSTGNTYLHWYQQKPGKAPKLLIYA |
| 92 | | ASDLESGVPSRFSGSGSGTDFTLTISSLQPEDFATYYCQQGHTLPWTFGQGTKVEI |
| | | K |
| TIGIT-211- | 1641 | DIQMTQSPSSLSASVGDRVTITCSASQDINKYLNWYQQKPGKAPKLLIYHTSRLQ |
| 93 | | SGVPSRFSGSGSGTDFTLTISSLQPEDFATYYCQQFAYFPATFGQGTKVEIK |
| TIGIT-211- | 1642 | DIQMTQSPSSLSASVGDRVTITCRSSQSLVHSTGNTYLHWYQQKPGKAPKLLIYA |
| 94 | | ASDLESGVPSRFSGSGSGTDFTLTISSLQPEDFATYYCQQGHTLPWTFGQGTKVEI |
| | | K |
| TIGIT-211- | 1643 | DIQMTQSPSSLSASVGDRVTITCRASQGVRTSLAWYQQKPGKAPKLLIYAKNNR |
| 95 | | PSGVPSRFSGSGSGTDFTLTISSLQPEDFATYYCQQSYSAPYTFGQGTKVEIK |
| TIGIT-211- | 1644 | DIQMTQSPSSLSASVGDRVTITCRSSQSLVHSTGNTYLHWYQQKPGKAPKLLIYA |
| 96 | | ASDLESGVPSRFSGSGSGTDFTLTISSLQPEDFATYYCQQGHTLPWTFGQGTKVEI |
| | | K |
| TIGIT-211- | 1645 | DIQMTQSPSSLSASVGDRVTITCRSSQSLVHSTGNTYLHWYQQKPGKAPKLLIYA |
| 97 | | ASDLESGVPSRFSGSGSGTDFTLTISSLQPEDFATYYCQQGHTLPWTFGQGTKVEI |
| | | K |
| TIGIT-211- | 1646 | DIQMTQSPSSLSASVGDRVTITCRASHFIGSLLSWYQQKPGKAPKLLIYETSKLAS |
| 98 | | GVPSRFSGSGSGTDFTLTISSLQPEDFATYYCQQSYSYPRTFGQGTKVEIK |
| TIGIT-211- | 1647 | DIQMTQSPSSLSASVGDRVTITCRSSQSLVHSTGNTYLHWYQQKPGKAPKLLIYA |
| 99 | | ASDLESGVPSRFSGSGSGTDFTLTISSLQPEDFATYYCQQGHTLPWTFGQGTKVEI |
| | | K |
| TIGIT-211- | 1648 | DIQMTQSPSSLSASVGDRVTITCRSSQSLVHSTGNTYLHWYQQKPGKAPKLLIYA |
| 100 | | ASDLESGVPSRFSGSGSGTDFTLTISSLQPEDFATYYCQQGHTLPWTFGQGTKVEI |
| | | K |
| TIGIT-211- | 1649 | DIQMTQSPSSLSASVGDRVTITCRSSQSLVHSTGNTYLHWYQQKPGKAPKLLIYA |
| 101 | | ASDLESGVPSRFSGSGSGTDFTLTISSLQPEDFATYYCQQGHTLPWTFGQGTKVEI |
| | | K |
| TIGIT-211- | 1650 | DIQMTQSPSSLSASVGDRVTITCRASQSISNNLNWYQQKPGKAPKLLIYAKNNRP |
| 102 | | SGVPSRFSGSGSGTDFTLTISSLQPEDFATYYCQQSYTTPPTFGQGTKVEIK |
| TIGIT-211- | 1651 | DIQMTQSPSSLSASVGDRVTITCRSSQSLVHSTGNTYLHWYQQKPGKAPKLLIYA |
| 103 | | ASDLESGVPSRFSGSGSGTDFTLTISSLQPEDFATYYCQQGHTLPWTFGQGTKVEI |
| | | K |
| TIGIT-211- | 1652 | DIQMTQSPSSLSASVGDRVTITCRASQSISNNLNWYQQKPGKAPKLLIYDASSSQ |
| 104 | | SGVPSRFSGSGSGTDFTLTISSLQPEDFATYYCQQSSSTPWTFGQGTKVEIK |
| TIGIT-211- | 1653 | DIQMTQSPSSLSASVGDRVTITCRSSQSLVHSTGNTYLHWYQQKPGKAPKLLIYA |
| 105 | | ASDLESGVPSRFSGSGSGTDFTLTISSLQPEDFATYYCQQGHTLPWTFGQGTKVEI |
| | | K |
| TIGIT-211- | 1654 | DIQMTQSPSSLSASVGDRVTITCRSSQSLVHSTGNTYLHWYQQKPGKAPKLLIYA |
| 106 | | ASDLESGVPSRFSGSGSGTDFTLTISSLQPEDFATYYCQQGHTLPWTFGQGTKVEI |
| | | K |
| TIGIT-211- | 1655 | DIQMTQSPSSLSASVGDRVTITCRSSQSLVHSTGNTYLHWYQQKPGKAPKLLIYA |
| 107 | | ASDLESGVPSRFSGSGSGTDFTLTISSLQPEDFATYYCQQGHTLPWTFGQGTKVEI |
| | | K |
| TIGIT-211- | 1656 | DIQMTQSPSSLSASVGDRVTITCRSSQSLVHSTGNTYLHWYQQKPGKAPKLLIYA |
| 108 | | ASDLESGVPSRFSGSGSGTDFTLTISSLQPEDFATYYCQQGHTLPWTFGQGTKVEI |
| | | K |
| TIGIT-211- | 1657 | DIQMTQSPSSLSASVGDRVTITCRSSQSLVHSTGNTYLHWYQQKPGKAPKLLIYA |
| 109 | | ASDLESGVPSRFSGSGSGTDFTLTISSLQPEDFATYYCQQGHTLPWTFGQGTKVEI |
| | | K |
| TIGIT-211- | 1658 | DIQMTQSPSSLSASVGDRVTITCRASQTIERRLNWYQQKPGKAPKLLIYGTTSLES |
| 110 | | GVPSRFSGSGSGTDFTLTISSLQPEDFATYYCQQSYTTLWTFGQGTKVEIK |
| TIGIT-211- | 1659 | DIQMTQSPSSLSASVGDRVTITCSGDNLRGYYASWYQQKPGKAPKLLIYGTSYR |
| 111 | | YSGVPSRFSGSGSGTDFTLTISSLQPEDFATYYCQQNLAPPYTFGQGTKVEIK |
| TIGIT-211- | 1660 | DIQMTQSPSSLSASVGDRVTITCRSSQSLVHSTGNTYLHWYQQKPGKAPKLLIYA |
| 112 | | ASDLESGVPSRFSGSGSGTDFTLTISSLQPEDFATYYCQQGHTLPWTFGQGTKVEI |
| | | K |
| TIGIT-211- | 1661 | DIQMTQSPSSLSASVGDRVTITCSGDKLGHTYTSWYQQKPGKAPKLLIYGKNIRP |
| 113 | | SGVPSRFSGSGSGTDFTLTISSLQPEDFATYYCQQNLAPPYTFGQGTKVEIK |
| TIGIT-211- | 1662 | DIQMTQSPSSLSASVGDRVTITCRASQSISNNLNWYQQKPGKAPKLLIYTASNLQ |
| 114 | | NGVPSRFSGSGSGTDFTLTISSLQPEDFATYYCQQSNSWPYTFGQGTKVEIK |
| TIGIT-211- | 1663 | DIQMTQSPSSLSASVGDRVTITCRSSQSLVHSTGNTYLHWYQQKPGKAPKLLIYA |
| 115 | | ASDLESGVPSRFSGSGSGTDFTLTISSLQPEDFATYYCQQGHTLPWTFGQGTKVEI |
| | | K |
| TIGIT-211- | 1664 | DIQMTQSPSSLSASVGDRVTITCRASQTIERRLNWYQQKPGKAPKLLIYHDNKRP |
| 116 | | SGVPSRFSGSGSGTDFTLTISSLQPEDFATYYCQQGYTLPWTFGQGTKVEIK |
| TIGIT-269-1 | 1665 | EIVLTQSPATLSLSPGERATLSCRASQSVSSGYLAWYQQKPGQAPRLLIYSTSSRA |
| | | TGIPDRFSGSGSGTDFTLTISRLEPEDFAVYYCQQSASAHPGWTFGQGTKVEIK |
| TIGIT-269-2 | 1666 | DIQMTQSPSSLSASVGDRVTITCRASQSINTFLNWYQQKPGKAPKLLIYGASSLQS |
| | | GVPSRFSGSGSGTDFTLTISSLQPEDFATYYCQQGYRAPWTFGQGTKVEIK |
| TIGIT-269-3 | 1667 | DIQMTQSPSSLSASVGDRVTITCRASQSVSSYLNWYQQKPGKAPKLLIYAATSLQ |
| | | SGVPSRFSGSGSGTDFTLTISSLQPEDFATYYCQQGYSTPWTFGQGTKVEIK |
| TIGIT-269-4 | 1668 | DIQMTQSPSSLSASVGDRVTITCRASQSIRTYLNWYQQKPGKAPKLLIYGASSLQ |
| | | SGVPSRFSGSGSGTDFTLTISSLQPEDFATYYCQQSYRVPRSFGQGTKVEIK |
| TIGIT-269-5 | 1669 | EIVLTQSPATLSLSPGERATLSCRASQSVSSGYLAWYQQKPGQAPRLLIYDASSR |
| | | ATGIPDRFSGSGSGTDFTLTISRLEPEDFAVYYCQHFGGSPLLTFGQGTKVEIK |
| TIGIT-269-6 | 1670 | DIQMTQSPSSLSASVGDRVTITCRASQHIGKYLNWYQQKPGKAPKLLIYGASSLQ |
| | | SGVPSRFSGSGSGTDFTLTISSLQPEDFATYYCQQTYSPVTFGQGTKVEIK |
| TIGIT-269-7 | 1671 | DIQMTQSPSSLSASVGDRVTITCRASQSIGGYLNWYQQKPGKAPKLLIYAVSSLQ |
| | | SGVPSRFSGSGSGTDFTLTISSLQPEDFATYYCQQGFYTPWTFGQGTKVEIK |
| TIGIT-269-8 | 1672 | DIQMTQSPSSLSASVGDRVTITCRASQSINTFLNWYQQKPGKAPKLLIYGASSLQS |
| | | GVPSRFSGSGSGTDFTLTISSLQPEDFATYYCQQGYRAPWTFGQGTKVEIK |
| TIGIT-269-9 | 1673 | DIQMTQSPSSLSASVGDRVTITCRASQNIGKYLNWYQQKPGKAPKLLIYAASSLQ |
| | | SGVPSRFSGSGSGTDFTLTISSLQPEDFATYYCHQSYGIPWTFGQGTKVEIK |
| TIGIT-269- | 1674 | DIQMTQSPSSLSASVGDRVTITCRASQNIRNYLNWYQQKPGKAPKLLIYGASSLQ |
| 10 | | SGVPSRFSGSGSGTDFTLTISSLQPEDFATYYCQQSYRSFFTFGQGTKVEIK |
| TIGIT-269- | 1675 | DIQMTQSPSSLSASVGDRVTITCRASQSIKNYLNWYQQKPGKAPKLLIYTASSLQ |
| 11 | | SGVPSRFSGSGSGTDFTLTISSLQPEDFATYYCQQSYGNVWTFGQGTKVEIK |
| TIGIT-269- | 1676 | DIQMTQSPSSLSASVGDRVTITCRASQSINTFLNWYQQKPGKAPKLLIYGASSLQS |
| 12 | | GVPSRFSGSGSGTDFTLTISSLQPEDFATYYCQQGYRAPWTFGQGTKVEIK |
| TIGIT-269- | 1677 | DIQMTQSPSSLSASVGDRVTITCRASQSITRYLNWYQQKPGKAPKLLIYTTSSLQS |
| 13 | | GVPSRFSGSGSGTDFTLTISSLQPEDFATYYCLQAYSTPWTFGQGTKVEIK |
| TIGIT-269- | 1678 | DIQMTQSPSSLSASVGDRVTITCRASEKISTYLNWYQQKPGKAPKLLIYAASSLQ |
| 14 | | SGVPSRFSGSGSGTDFTLTISSLQPEDFATYYCQQSHQTPWTFGQGTKVEIK |
| TIGIT-269- | 1679 | EIVLTQSPATLSLSPGERATLSCRASQSVNSNHLAWYQQKPGQAPRLLIYSTSSR |
| 15 | | ATGIPDRFSGSGSGTDFTLTISRLEPEDFAVYYCQQSGSSSLTFGQGTKVEIK |
| TIGIT-269- | 1680 | DIQMTQSPSSLSASVGDRVTITCRASQSISNYLNWYQQKPGKAPKLLIYGATSLQ |
| 16 | | SGVPSRFSGSGSGTDFTLTISSLQPEDFATYYCQQSYIMSQWTFGQGTKVEIK |
| TIGIT-269- | 1681 | DIQMTQSPSSLSASVGDRVTITCRASQSITRYLNWYQQKPGKAPKLLIYGASSLQ |
| 17 | | SGVPSRFSGSGSGTDFTLTISSLQPEDFATYYCQQGFRAPRTFGQGTKVEIK |
| TIGIT-269- | 1682 | DIQMTQSPSSLSASVGDRVTITCRASQSVGSYLNWYQQKPGKAPKLLIYSASSLQ |
| 18 | | SGVPSRFSGSGSGTDFTLTISSLQPEDFATYYCQQSHATPWTFGQGTKVEIK |
| TIGIT-269- | 1683 | EIVLTQSPATLSLSPGERATLSCRASHSVSNNYLAWYQQKPGQAPRLLIYGASSR |
| 19 | | ATGIPDRFSGSGSGTDFTLTISRLEPEDFAVYYCQLFDRSRPGYTFGQGTKVEIK |
| TIGIT-269- | 1684 | DIQMTQSPSSLSASVGDRVTITCRASQSINTFLNWYQQKPGKAPKLLIYGASSLQS |
| 20 | | GVPSRFSGSGSGTDFTLTISSLQPEDFATYYCQQGYRAPWTFGQGTKVEIK |
| TIGIT-269- | 1685 | EIVLTQSPATLSLSPGERATLSCRASQSVSGTYLAWYQQKPGQAPRLLIYGASSR |
| 21 | | ATGIPDRESGSGSGTDFTLTISRLEPEDFAVYYCQQYKRSSGFTFGQGTKVEIK |
| TIGIT-471- | 2190 | DIQMTQSPSSLSASVGDRVTITCRASQTIERRLNWYQQKPGKAPKLLIYDASSLH |
| 001 | | TGVPSRFSGSGSGTDFTLTISSLQPEDFATYYCQQSYIIPPTFGQGTKVEIK |
| TIGIT-471- | 2191 | DIQMTQSPSSLSASVGDRVTITCRASHGVRTSLAWYQQKPGKAPKLLIYGKNNR |
| 009 | | PTGVPSRFSGSGSGTDFTLTISSLQPEDFATYYCQQSLAPPYTFGQGTKVEIK |
| TIGIT-471- | 2192 | DIQMTQSPSSLSASVGDRVTITCRATQAIERRLKWYQQKPGKAPKLLIYDNSSRQ |
| 017 | | TGVPSRFSGSGSGTDFTLTISSLQPEDFATYYCQQSYIIPYTFGQGTKVEIK |
| TIGIT-471- | 2193 | DIQMTQSPSSLSASVGDRVTITCSASQDINKYLNWYQQKPGKAPKLLIYHTSRLQ |
| 025 | | SGVPSRFSGSGSGTDFTLTISSLQPEDFATYYCQQYTYFPATFGQGTNVEIK |
| TIGIT-471- | 2194 | DIQMTQSPSSLSASVGDRVTITCRASQGVRTSLAWYQQKPGKAPKLLIYAKNNR |
| 033 | | PSGVPSRFSGSGSGTDFTLTISSLQPEDFATYYCQQSYSAPYTFGQGTKVEIK |
| TIGIT-471- | 2195 | DIQMTQSPSSLSASVGDRVTITCSASHDINEYLNWYQQKPGKAPKLLIYHTSRLQ |
| 041 | | SGVPSRFSGSESVTDFTLTISSLQPEDFATYYCQQFAYFPATFGQGTKVEIK |
| TIGIT-471- | 2196 | dIQMTPSPSSLSASVGDKITITCRPAHNIGNFLNWYQQKPRKAPKLLIYKTTWLHS |
| 049 | | SVPSSISGGGSATDYTLTIISLQPADYATYYCRHRSSYLPTFGQGTKVEIK |
| TIGIT-471- | 2197 | DIQMTQSPSSLSASVGDRVTITCRASQNIRSYLNWYQQKPGKAPKLLIYGKNIRP |
| 005 | | SGVPSRFSGSGSGTDFTLTISSLQPEDFATYYCQQYASVPVTFGQGTKVEIK |
| TIGIT-471- | 2198 | DIQMTQYPSSLSASVGDRVTIICSGNKLGDKYASWFQQKPGKARKLLIYRISWLQ |
| 013 | | SGVPARFSGSGSGTDFTVTISSMHREDFATYYCVARPLRGNPHVLFGQGTKVEIK |
| TIGIT-471- | 2199 | DIQMTQSPSSLSASVGDRVTITCRASQGVRTSLAWYQQKPGKAPKLLIYAKNNR |
| 021 | | PSGVPSRFSGSGSGTDFTLTISSLQPEDFATYYCQQSYSAPYTFGQGTKVEIK |
| TIGIT-471- | 2200 | DIQMTQSPSSLSASVGDRVTITCRASQGVRTSLAWYQQKPGKAPKLLIYAINNRP |
| 029 | | SGVPSRFSGSGSGTDFTLTISSLQPEDFATYYCQQSYSAPYTFGQGTKVRSK |
| TIGIT-471- | 2201 | DIQMTQSPSSLSASVGDRVTITCSASQDIRRYLNWYQQKPGKAPKLLIYHTSTLQ |
| 037 | | SGVPSRFSGSGSGTDFTLTISSLQPDDFASYYCQQYRLFGQGTKVEIK |
| TIGIT-471- | 2202 | DIQMTQSPSSLSASVGDRVTITCSASQDINKYLNWYQQKPGKAPKLLIYHTSRLQ |
| 045 | | SGVPSRFSGSGSGTDFTLTISSLQPEDFATYYCQQYTYFFGQGTKVEIK |
| TIGIT-471- | 2203 | DIQMTQSPSSLSASVGDRVTITCRASQNIRSYLNWYQQKPGKAPKLLIYGKNIRP |
| 002 | | SGVPSRFSGSGSGTDFTLTISSLQPEDFATYYCQQYASVPVTFGQGTKVEIK |
| TIGIT-471- | 2204 | DIQMTQSPSSLSASVGDRVTITCSAYQDINKYLNWYQQKPGKAPKLLIYHKSRL |
| 010 | | QSGVPSRFSGSGSGTDFTLTISSLQPEDFATYYCQQFAYFPATFGQGTKVEIK |
| TIGIT-471- | 2205 | DIQMTQSPSSLSASVGDRVTITCRASQTIERRLNWYQQKPGKAPKLLIYDTSSRH |
| 018 | | TGVPSRFSGSGSGTDFTLTISSLQPEDFATYYCQQSYIIPPTFGQGTKVEIK |
| TIGIT-471- | 2206 | DIQMTQSPSSLSASVGDRVTITCRASQDIGNFLNWYQQKPGKAPKLLIYRTSWLQ |
| 026 | | SGVPSRFSGSGSGTDFTLTISSLQPEDFATYYCQQRSSYPPTFGQGTNVEIK |
| TIGIT-471- | 2207 | DIQMTQSPSSLSASVGDRVTITCRASQSISSYVNWYQQKPGKAPKLLIYRASTLA |
| 034 | | SGVPSRFSGSGSGTDFTLTISSLQPEDFATYYCQQFAYFPATFGQGTKVEIK |
| TIGIT-471- | 2208 | DIQMTQSPSSLSASVGDRVTITCRASQVVSTSLSWYQQKPGKAPKLLIYANNNR |
| 042 | | ASGVPSRFSGSGSGTDFTLTISSLQPEDFATYYCQQSYTAPYTFGQGTKVEIK |
| TIGIT-471- | 2209 | DIQMTQSPSSLSASVGDRVTITCRATQTIETSLKWYQQKPGKAPKLLIYDKNSLQ |
| 006 | | TGVPSRFSGSGSGTDFTLTISSLQPEDFATYYCQQSYSTPHTFGQGTKVEIK |
| TIGIT-471- | 2210 | DIQMTQSPSSLSASVGDRVTITCRASQNIRSYLNWYQQKPGKAPKLLIYGKNIRP |
| 014 | | SGVPSRFSGSGSGTDFTLTISSLQPEDFATYYCQQYASVPVTFGQGTKVEIK |
| TIGIT-471- | 2211 | DIQMTQSPSSLSASVGDRVTITCRASQNIRSYLNWYQQKPGKAPKLLIYGKNIRP |
| 022 | | SGVPSRFSGSGSGTDFTLTISSLQPEDFATYYCQQYASVPVTFGQGTKVEIK |
| TIGIT-471- | 2212 | DIQMTQSPSSLSASVGDRVTITCCASQDINKFLNWYQQKPGKAPKLLIYHTSRLQ |
| 030 | | SGVPSRFSGSGSGTDFTLTISSLQPEDFATYYCQQFASFPATFGQGTKVEIK |
| TIGIT-471- | 2213 | DIQMTQSPSSLSASVGDRVTITCRASQTIERRLNWYQQKPGKAPKLLIYDASSLH |
| 038 | | TGVSSRFSGSGSGTYFTLTISSLQAEDFATYYCQQSYIIPPTFGQGTKVEIK |
| TIGIT-471- | 2214 | DIQMTQSPSSLSASVGDRVTITCAASGFNIKDTYIHWYQQKPGKAPKLLIYGTTS |
| 046 | | LESGVPSRFSGSGSGTDFTLTISSLQPEDFATYYCQQSYSTPRTFGQGTKVEIK |
| TIGIT-471- | 2215 | DIQMTQSPSSLSASVGDRVTITCRASQTISSYLNWYQQKPGKAPKLLIYENNNRP |
| 003 | | SGVPSRFSGSGSGTDFTLTISSLQPEDFATYYCQQSYIIPPTFGQGTKVEIK |
| TIGIT-471- | 2216 | DIQMTQSPSSLSASVGDRVTITCSASQDINKYLNWYQQKPGKAPKLLIYHTSRLQ |
| 011 | | SGVPSRFSGSGSGTDFTLTISSLQPEDFATYYCQQVVWRPFTFGQGTKVEIK |
| TIGIT-471- | 2217 | DIQMTQSPSSLSASVGDRVTITCRASQTIERRLNWYQQKPGKAPKLLIYDASSLH |
| 019 | | TGVPSRFSGSGSGTDFTLTISSLQPEDFATYYCQQSYIIPPTFGQGTKVEIK |
| TIGIT-471- | 2218 | DIQMTQSPSSLSASVGDRVTITCRASQTISSYLNWYQQKPGKAPKLLIYENNNRP |
| 027 | | SGVPSRFSGSGSGTDFTLTISSLQPEDFATYYCQQSYIIPPTFGQGTNVEIK |
| TIGIT-471- | 2219 | DIQMTQSPSSLSASVGDRVTITCSGDKLGHTYTSWYQQKPGKAPKLLIYRASTLA |
| 035 | | SGVPSRFSGSGSGTDFTLTISSLQPEDFATYYCQQGYTLPWTFGQGTKVEIK |
| TIGIT-471- | 2220 | DIQMTQSPSSLSASVGDRVTITCRANQNIGNFLNWYQQKPGKAPKLLIYHTSRLQ |
| 043 | | DWIPSRESASVSGTDFTLTISSLQSEDCATYYCQQLAFGQGTKVEIK |
| TIGIT-471- | 2221 | DIQMTQSPSSLSASVGDRVTITCSASQDINKYLNWYQQKPGKAPKLLIYHTSRLQ |
| 007 | | SGVPSRFSGSGSGTDFTLTISSLQPEDFATYYCQQFAYFPATFGQGTKVEIK |
| TIGIT-471- | 2222 | DIQMTQSPSSLSASVGDRVTITCRASHGVRTSLAWYQQKPGKAPKLLIYGKNNR |
| 015 | | PTGVPSRFSGSGSGTDFTLTISSLQPEDFATYYCQQSYSAPYTFGQGTKVEIK |
| TIGIT-471- | 2223 | DIQMTQSPSSLSASVGDRVTITCRATQSIRSFLNWYQQKPGKAPKLLIYKVSNRFS |
| 023 | | GVPSRFSGSGSGTDFTLTISSLQPEDFATYYCQQYDAYPPTLGQGTKVEIK |
| TIGIT-471- | 2224 | DIQMTQSPSSLSASVGDRVTITCRASQDIGNFLNWYQQKPGKAPKLLIYRTSWLQ |
| 031 | | SGVPSRFSGSGSGTDFTLTISSLQPEDFATYYCQQRSSYSATFGQGTKVEIK |
| TIGIT-471- | 2225 | DIQMTQSPSSLSASVGDRVTITCSGNKLGDKYASWYQQKPGKAPKLLIYRTTWL |
| 039 | | QSGVPSRFSGSGSGTDFTLTISSLQPEDFATYYCVARAVRGNPLVLFGQGTKVEI |
| | | K |
| TIGIT-471- | 2226 | DIQMTQSPSSLSASVGDRVTITCRASQGVRTSLAWYQQKPGKAPKLLIYGKNIRP |
| 047 | | IGVPSRFSGSGSGTDFTLTISSLQPEDFATYYCGQSYRYRLTFGQGTKVEIK |
| TIGIT-471- | 2227 | DIQMTQSPSSLSASVGDRVTITCRASQGVRTSLAWYQQKPGKAPKLLIYAKNNR |
| 004 | | PSGVPSRFSGSGSGTDFTLTISSLQPEDFATYYCQQSYSAPYTFGQGTKVEIK |
| TIGIT-471- | 2228 | DIQMTQSPSSLSASVGDRVTITCRASQRISSFLNWYQQKPGKAPKLLIYGKNIRPS |
| 012 | | GVPSRFSGSGSGTDFTLTISSLQPEDFATYYCQQSYELPLTFGQGTKVEIK |
| TIGIT-471- | 2229 | DIQMTQSPSSLSASVGDRVTITCCASQDINKYLNWYQQKPGKAPKLLIYHTSRLQ |
| 020 | | SGVPSRFSGSGSGTDFTLTISSLQPEDFATYYCQQFAYFPATFGQGTKVEIK |
| TIGIT-471- | 2230 | DIQMTQSPSSLSASVGDRVTITCRASQSVDRYFNWYQQKPGKAPKLLIYAASSLY |
| 028 | | SGVPSRFSGSGSGTDFTLTISSLQPEDFATYYCQQSYRTPLTFGQGTNVEIK |
| TIGIT-471- | 2231 | DIQMTQSPSSLSASVGDRVTITCRASQNIRSYLNWYQQKPGKAPKLLIYGKNIRP |
| 036 | | SGVPSRFSGSGSGTDFTLTISSLQPEDFATYYCQQYASVPVTFGQGTKVEIK |
| TIGIT-471- | 2232 | DIHMTHSPSSLSASVGDRVTITCSASQDINKYLNWYQQKPGKAPKLLIYHTSTLQ |
| 044 | | SPFPSRFSGSGSGTDFTLTISSLQPEDFATYYCQQFAYFPATFGQGTKVEIK |
| TIGIT-471- | 2233 | DIQMTQSPSSLSASVGDRVTITCRSSQSLVHSTGNTYLHWYQQKPGKAPKLLIYQ |
| 008 | | MSHLASGVPSRFSGSGSGTDFTLTISSLQPEDFATYYCQQSYSAPTFGQGTKVEIK |
| TIGIT-471- | 2234 | DIQMTQSPSSLSASVGDRVTITCRASQGVRTSLAWYQQKPGKAPKLLIYAKNNR |
| 016 | | PSGVPSRFSGSGSGTDFTLTISSLQPEDFATYYCQQSYSAPYTFGQGTKVEIK |
| TIGIT-471- | 2235 | DIQMTQSPSSLSASVGDRVTITCRSSQSLVHSTGNTYLHWYQQKPGKAPKLLIYQ |
| 024 | | MSHLASGVPSRFSGSGSGTDFTLTISSLQPEDFATYYCQQSYSAPTFGQGTNVEIK |
| TIGIT-471- | 2236 | DIQMTQSPSSLSASVGDRVTITCRASQGVRTSLAWYQQKPGKAPKLLIYAKNNR |
| 032 | | PSGVPSRFSGSGSGTDFTLTISSLQPEDFATYYCQQSYSVPYTFGQGTKVEIK |
| TIGIT-471- | 2237 | EIQMTQSPSSLSASVGDRVTITCRASQGVRTSLAWYQQKPRKAPKLLIYALNNRP |
| 040 | | SGVPSRFSGSGSGTDFTLTISSLQPEDFATYYCQQSYSAPYTFGQGTKVEIK |
| TIGIT-471- | 2238 | DIQMTQSPSSLSASVGDRVTITCGASQTIERRLNWYQQKPGKAPKLLIYDASSLH |
| 048 | | TGVPSRISGSGSGTDFTLTISSLQPEHFATYYCQQSYIIPPTFGQGTKVEIK |

TABLE 16
TIGIT Sequences

| | | |
|---|---|---|
| TIGIT-29-01 | 1686 | MKHLWFFLLLVAAPRWVLSEVQLVESGGGLVQAGGSLRLSCAASGRTFSNYAM |
| | | GWFRQAPGKEREFVAAITWSGTRTDYADSVKGRFTISADNAKNTVYLQMNSLK |
| | | PEDTAVYYCAAAAWTIYEYDYWGQGTQVTVSSGGGGSEPKSSDKTHTCPPCPA |
| | | PELLGGPSVFLFPPKPKDTLMISRTPEVTCVVVDVSHEDPEVKFNWYVDGVEV |
| | | HNAKTKPREEQYNSTYRVVSVLTVLHQDWLNGKEYKCKVSNKALPAPIEKTIS |
| | | KAKGQPREPQVYTLPPSREEMTKNQVSLTCLVKGFYPSDIAVEWESNGQPENN |
| | | YKTTPPVLDSDGSFFLYSLTVDKSRWQQGNVFSCSVMHEALHNHYTQKSLSLS |
| | | PG |
| TIGIT-29-02 | 1687 | MKHLWFFLLLVAAPRWVLSEVQLVESGGGLVQAGGSLRLSCAASGRTFDIYAM |
| | | GWFRQAPGKEREWVSTISWSGGRTYYADSVKGRFTISADNAKNTVYLQMNSLK |
| | | PEDTAVYYCAARPVYRTYGSWGQGTQVTVSSGGGGSEPKSSDKTHTCPPCPAP |
| | | ELLGGPSVFLFPPKPKDTLMISRTPEVTCVVVDVSHEDPEVKENWYVDGVEVH |
| | | NAKTKPREEQYNSTYRVVSVLTVLHQDWLNGKEYKCKVSNKALPAPIEKTISK |
| | | AKGQPREPQVYTLPPSREEMTKNQVSLTCLVKGFYPSDIAVEWESNGQPENNY |
| | | KTTPPVLDSDGSFFLYSKLTVDKSRWQQGNVFSCSVMHEALHNHYTQKSLSLS |
| | | PG |
| TIGIT-29-03 | 1688 | MKHLWFFLLLVAAPRWVLSEVQLVESGGGLVQAGGSLRLSCAASGFTFSSYAM |
| | | GWFRQAPGKEREFVAAITWSGTRTDYADSVKGRFTISADNAKNTVYLQMNSLK |
| | | PEDTAVYYCAAAAWRYSEYDYWGQGTQVTVSSGGGGSEPKSSDKTHTCPPCPA |
| | | PELLGGPSVFLFPPKPKDTLMISRTPEVTCVVVDVSHEDPEVKFNWYVDGVEV |
| | | HNAKTKPREEQYNSTYRVVSVLTVLHQDWLNGKEYKCKVSNKALPAPIEKTIS |
| | | KAKGQPREPQVYTLPPSREEMTKNQVSLTCLVKGFYPSDIAVEWESNGQPENN |
| | | YKTTPPVLDSDGSFFLYSKLTVDKSRWQQGNVFSCSVMHEALHNHYTQKSLSL |
| | | SPG |
| TIGIT-29-4 | 1689 | MKHLWFFLLLVAAPRWVLSEVQLVESGGGLVQAGGSLRLSCAASGSTFDTYVM |
| | | GWFRQAPGKERELVSTISSDGDSTYYADSVKGRFTISADNAKNTVYLQMNSLK |
| | | PEDTAVYYCAAGTRRGRNYWGQGTQVTVSSGGGGSEPKSSDKTHTCPPCPAPE |
| | | LLGGPSVFLFPPKPKDTLMISRTPEVTCVVVDVSHEDPEVKFNWYVDGVEVHN |
| | | AKTKPREEQYNSTYRVVSVLTVLHQDWLNGKEYKCKVSNKALPAPIEKTISKA |
| | | KGQPREPQVYTLPPSREEMTKNQVSLTCLVKGFYPSDIAVEWESNGQPENNYK |
| | | TTPPVLDSDGSFFLYSKLTVDKSRWQQGNVFSCSVMHEALHNHYTQKSLSLSP |
| | | G |
| TIGIT-29-5 | 1690 | MKHLWFFLLLVAAPRWVLSEVQLVESGGGLVQAGGSLRLSCAASGRTFSIYAM |
| | | GWFRQAPGKEREWVATISSSGDRTYYADSVKGRFTISADNAKNTVYLQMNSLK |
| | | PEDTAVYYCAARRYGRRYDYWGQGTQVTVSSGGGGSEPKSSDKTHTCPPCPAP |
| | | ELLGGPSVFLFPPKPKDTLMISRTPEVTCVVVDVSHEDPEVKENWYVDGVEVH |
| | | NAKTKPREEQYNSTYRVVSVLTVLHQDWLNGKEYKCKVSNKALPAPIEKTISK |
| | | AKGQPREPQVYTLPPSREEMTKNQVSLTCLVKGFYPSDIAVEWESNGQPENNY |
| | | KTTPPVLDSDGSFFLYSKLTVDKSRWQQGNVFSCSVMHEALHNHYTQKSLSLS |
| | | PG |
| TIGIT-29-06 | 1691 | MKHLWFFLLLVAAPRWVLSEVQLVESGGGLVQAGGSLRLSCAASGGTFRSYVM |
| | | GWFRQAPGKEREWVATINSSGSRTYYADSVKGRFTISADNAKNTVYLQMNSLK |
| | | PEDTAVYYCAARPNYRDYEYWGQGTQVTVSSGGGGSEPKSSDKTHTCPPCPAP |
| | | ELLGGPSVFLFPPKPKDTLMISRTPEVTCVVVDVSHEDPEVKFNWYVDGVEVH |
| | | NAKTKPREEQYNSTYRVVSVLTVLHQDWLNGKEYKCKVSNKALPAPIEKTISK |
| | | AKGQPREPQVYTLPPSREEMTKNQVSLTCLVKGFYPSDIAVEWESNGQPENNY |
| | | KTTPPVLDSDGSFFLYSKLTVDKSRWQQGNVFSCSVMHEALHNHYTQKSLSLS |
| | | PG |
| TIGIT-29-07 | 1692 | MKHLWFFLLLVAAPRWVLSEVQLVESGGGLVQAGGSLRLSCAASGSIFSNYAM |
| | | GWFRQAPGKEREFVATISRGGTRTNYADSVKGRFTISADNAKNTVYLQMNSLK |
| | | PEDTAVYYCAAAAWTIYAYNYWGQGTQVTVSSGGGGSEPKSSDKTHTCPPCPA |
| | | PELLGGPSVFLFPPKPKDTLMISRTPEVTCVVVDVSHEDPEVKFNWYVDGVEV |
| | | HNAKTKPREEQYNSTYRVVSVLTVLHQDWLNGKEYKCKVSNKALPAPIEKTIS |
| | | KAKGQPREPQVYTLPPSREEMTKNQVSLTCLVKGFYPSDIAVEWESNGQPENN |
| | | YKTTPPVLDSDGSFFLYSKLTVDKSRWQQGNVFSCSVMHEALHNHYTQKSLSL |
| | | SPG |
| TIGIT-29-8 | 1693 | MKHLWFFLLLVAAPRWVLSEVQLVESGGGLVQAGGSLRLSCAASGRTLDDYVM |
| | | GWFRQAPGKEREGVATISGGGDTTYYADSVKGRFTISADNAKNTVYLQMNSLK |
| | | PEDTAVYYCAAVPWRWTTRRDYWGQGTQVTVSSGGGGSEPKSSDKTHTCPPCP |
| | | APELLGGPSVFLFPPKPKDTLMISRTPEVTCVVVDVSHEDPEVKFNWYVDGVE |
| | | VHNAKTKPREEQYNSTYRVVSVLTVLHQDWLNGKEYKCKVSNKALPAPIEKTI |
| | | SKAKGQPREPQVYTLPPSREEMTKNQVSLTCLVKGFYPSDIAVEWESNGQPEN |
| | | NYKTTPPVLDSDGSFFLYSKLTVDKSRWQQGNVFSCSVMHEALHNHYTQKSLS |
| | | LSPG |
| TIGIT-29-9 | 1694 | MKHLWFFLLLVAAPRWVLSEVQLVESGGGLVQAGGSLRLSCAASGFTFDNYAM |
| | | GWFRQAPGKEREFVSSITWSGGRTSYADSVKGRFTISADNAKNTVYLQMNSLK |
| | | PEDTAVYYCAANAWTIYRYDYWGQGTQVTVSSGGGGSEPKSSDKTHTCPPCPA |
| | | PELLGGPSVFLFPPKPKDTLMISRTPEVTCVVVDVSHEDPEVKFNWYVDGVEV |
| | | HNAKTKPREEQYNSTYRVVSVLTVLHQDWLNGKEYKCKVSNKALPAPIEKTIS |
| | | KAKGQPREPQVYTLPPSREEMTKNQVSLTCLVKGFYPSDIAVEWESNGQPENN |
| | | YKTTPPVLDSDGSFFLYSKLTVDKSRWQQGNVFSCSVMHEALHNHYTQKSLSL |
| | | SPG |
| TIGIT-29-10 | 1695 | MKHLWFFLLLVAAPRWVLSEVQLVESGGGLVQAGGSLRLSCAASGRTFSNYGM |
| | | GWFRQAPGKEREFVSGISGSGGRTSYADSVKGRFTISADNAKNTVYLQMNSLK |
| | | PEDTAVYYCAANLWYPVDRLNTGFNYWGQGTQVTVSSGGGGSEPKSSDKTHTC |
| | | PPCPAPELLGGPSVFLFPPKPKDTLMISRTPEVTCVVVDVSHEDPEVKFNWYV |
| | | DGVEVHNAKTKPREEQYNSTYRVVSVLTVLHQDWLNGKEYKCKVSNKALPAPI |
| | | EKTISKAKGQPREPQVYTLPPSREEMTKNQVSLTCLVKGFYPSDIAVEWESNG |
| | | QPENNYKTTPPVLDSDGSFFLYSKLTVDKSRWQQGNVFSCSVMHEALHNHYTQ |
| | | KSLSLSPG |
| TIGIT-29-11 | 1696 | MKHLWFFLLLVAAPRWVLSEVQLVESGGGLVQAGGSLRLSCAASGRTLSSYAM |
| | | GWFRQAPGKEREFVASITWGGGRTYYADSVKGRFTISADNAKNTVYLQMNSLK |
| | | PEDTAVYYCATRLWGTWTAGDYDYWGQGTQVTVSSGGGGSEPKSSDKTHTCPP |
| | | CPAPELLGGPSVFLFPPKPKDTLMISRTPEVTCVVVDVSHEDPEVKFNWYVDG |
| | | VEVHNAKTKPREEQYNSTYRVVSVLTVLHQDWLNGKEYKCKVSNKALPAPIEK |
| | | TISKAKGQPREPQVYTLPPSREEMTKNQVSLTCLVKGFYPSDIAVEWESNGQP |
| | | ENNYKTTPPVLDSDGSFFLYSKLTVDKSRWQQGNVFSCSVMHEALHNHYTQKS |
| | | LSLSPG |
| TIGIT-29-12 | 1697 | MKHLWFFLLLVAAPRWVLSEVQLVESGGGLVQAGGSLRLSCAASGSTFSSYAM |
| | | GWFRQAPGKEREFVAAITWSGTRTNYADSVKGRFTISADNAKNTVYLQMNSLK |
| | | PEDTAVYYCAAAAWTIYTYDSWGQGTQVTVSSGGGGSEPKSSDKTHTCPPCPA |
| | | PELLGGPSVFLFPPKPKDTLMISRTPEVTCVVVDVSHEDPEVKFNWYVDGVEV |
| | | HNAKTKPREEQYNSTYRVVSVLTVLHQDWLNGKEYKCKVSNKALPAPIEKTIS |
| | | KAKGQPREPQVYTLPPSREEMTKNQVSLTCLVKGFYPSDIAVEWESNGQPENN |
| | | YKTTPPVLDSDGSFFLYSKLTVDKSRWQQGNVFSCSVMHEALHNHYTQKSLSL |
| | | SPG |
| TIGIT-29-13 | 1698 | MKHLWFFLLLVAAPRWVLSEVQLVESGGGLVQAGGSLRLSCAASGFIFSNYAM |
| | | GWFRQAPGKEREFVAAITWSGGRTYYADSVKGRFTISADNAKNTVYLQMNSLK |
| | | PEDTAVYYCAAAAWTIYEYDYWGQGTQVTVSSGGGGSEPKSSDKTHTCPPCPA |
| | | PELLGGPSVFLFPPKPKDTLMISRTPEVTCVVVDVSHEDPEVKFNWYVDGVEV |
| | | HNAKTKPREEQYNSTYRVVSVLTVLHQDWLNGKEYKCKVSNKALPAPIEKTIS |
| | | KAKGQPREPQVYTLPPSREEMTKNQVSLTCLVKGFYPSDIAVEWESNGQPENN |
| | | YKTTPPVLDSDGSFFLYSKLTVDKSRWQQGNVFSCSVMHEALHNHYTQKSLSL |
| | | SPG |
| TIGIT-29-14 | 1699 | MKHLWFFLLLVAAPRWVLSEVQLVESGGGLVQAGGSLRLSCAASGFTFSDYVM |
| | | GWFRQAPGKEREFVSAISWSGTNTNYADSVKGRFTISADNAKNTVYLQMNSLK |
| | | PEDTAVYYCATRALRDGRGYWGQGTQVTVSSGGGGSEPKSSDKTHTCPPCPAP |
| | | ELLGGPSVFLFPPKPKDTLMISRTPEVTCVVVDVSHEDPEVKFNWYVDGVEVH |
| | | NAKTKPREEQYNSTYRVVSVLTVLHQDWLNGKEYKCKVSNKALPAPIEKTISK |
| | | AKGQPREPQVYTLPPSREEMTKNQVSLTCLVKGFYPSDIAVEWESNGQPENNY |
| | | KTTPPVLDSDGSFFLYSKLTVDKSRWQQGNVFSCSVMHEALHNHYTQKSLSLS |
| | | PG |
| TIGIT-29-15 | 1700 | MKHLWFFLLLVAAPRWVLSEVQLVESGGGLVQAGGSLRLSCAASGRTFDSYAM |
| | | GWFRQAPGKEREGVATISGSGGRTYYADSVKGRFTISADNAKNTVYLQMNSLK |
| | | PEDTAVYYCAAAAWTIYEFDSWGQGTQVTVTSGGGGSEPKSSDKTHTCPPCPA |
| | | PELLGGPSVFLFPPKPKDTLMISRTPEVTCVVVDVSHEDPEVKFNWYVDGVEV |
| | | HNAKTKPREEQYNSTYRVVSVLTVLHQDWLNGKEYKCKVSNKALPAPIEKTIS |
| | | KAKGQPREPQVYTLPPSREEMTKNQVSLTCLVKGFYPSDIAVEWESNGQPENN |
| | | YKTTPPVLDSDGSFFLYSKLTVDKSRWQQGNVFSCSVMHEALHNHYTQKSLSL |
| | | SPG |
| TIGIT-29-16 | 1701 | MKHLWFFLLLVAAPRWVLSEVQLVESGGGLVQAGGSLRLSCAASGSIFSIYAM |
| | | GWFRQAPGKEREWVATISWGGNSTYYADSVKGRFTISADNAKNTVYLQMNSLK |
| | | PEDTAVYYCAARPRFRTYGYWGQGTQVTVSSGGGGSEPKSSDKTHTCPPCPAP |
| | | ELLGGPSVFLFPPKPKDTLMISRTPEVTCVVVDVSHEDPEVKFNWYVDGVEVH |
| | | NAKTKPREEQYNSTYRVVSVLTVLHQDWLNGKEYKCKVSNKALPAPIEKTISK |
| | | AKGQPREPQVYTLPPSREEMTKNQVSLTCLVKGFYPSDIAVEWESNGQPENNY |
| | | KTTPPVLDSDGSFFLYSKLTVDKSRWQQGNVFSCSVMHEALHNHYTQKSLSLS |
| | | PG |
| TIGIT-29-17 | 1702 | MKHLWFFLLLVAAPRWVLSEVQLVESGGGLVQAGGSLRLSCAASGSTLSIYAM |
| | | GWFRQAPGKERELVATISSGGGSTYYADSVKGRFTISADNAKNTVYLQMNSLK |
| | | PEDTAVYYCAAGSVYGRNYWGQGTQVTVSSGGGGSEPKSSDKTHTCPPCPAPE |
| | | LLGGPSVFLFPPKPKDTLMISRTPEVTCVVVDVSHEDPEVKFNWYVDGVEVHN |
| | | AKTKPREEQYNSTYRVVSVLTVLHQDWLNGKEYKCKVSNKALPAPIEKTISKA |
| | | KGQPREPQVYTLPPSREEMTKNQVSLTCLVKGFYPSDIAVEWESNGQPENNYK |
| | | TTPPVLDSDGSFFLYSKLTVDKSRWQQGNVFSCSVMHEALHNHYTQKSLSLSP |
| | | G |
| TIGIT-29-18 | 1703 | MKHLWFFLLLVAAPRWVLSEVQLVESGGGLVQAGGSLRLSCAASGSTFSNYAM |
| | | GWFRQAPGKEREFVSAINSSGSRTYYADSVKGRFTISADNAKNTVYLQMNSLK |
| | | PEDTAVYYCAARLWGTWTAGDYDYWGQGTQVTVSSGGGGSEPKSSDKTHTCPP |
| | | CPAPELLGGPSVFLFPPKPKDTLMISRTPEVTCVVVDVSHEDPEVKFNWYVDG |
| | | VEVHNAKTKPREEQYNSTYRVVSVLTVLHQDWLNGKEYKCKVSNKALPAPIEK |
| | | TISKAKGQPREPQVYTLPPSREEMTKNQVSLTCLVKGFYPSDIAVEWESNGQP |
| | | ENNYKTTPPVLDSDGSFFLYSKLTVDKSRWQQGNVFSCSVMHEALHNHYTQKS |
| | | LSLSPG |
| TIGIT-29-19 | 1704 | MKHLWFFLLLVAAPRWVLSEVQLVESGGGLVQAGGSLRLSCAASGRTFSSYAM |
| | | GWFRQAPGKEREFVATISGSFGRTYYADSVKGRFTISADNAKNTVYLQMNSLK |
| | | PEDTAVYYCAAGAWTIYEYDYWGQGTQVTVSSGGGGSEPKSSDKTHTCPPCPA |
| | | PELLGGPSVFLFPPKPKDTLMISRTPEVTCVVVDVSHEDPEVKFNWYVDGVEV |
| | | HNAKTKPREEQYNSTYRVVSVLTVLHQDWLNGKEYKCKVSNKALPAPIEKTIS |
| | | KAKGQPREPQVYTLPPSREEMTKNQVSLTCLVKGFYPSDIAVEWESNGQPENN |
| | | YKTTPPVLDSDGSFFLYSKLTVDKSRWQQGNVFSCSVMHEALHNHYTQKSLSL |
| | | SPG |
| TIGIT-29-20 | 1705 | MKHLWFFLLLVAAPRWVLSEVQLVESGGGLVQAGGSLRLSCAASGSTFSIYAM |
| | | GWFRQAPGKERELVASISWSGDTTNYADSVKGRFTISADNAKNTVYLQMNSLK |
| | | PEDTAVYYCAAGSVYGRNSWGQGTQVTVTSGGGGSEPKSSDKTHTCPPCPAPE |
| | | LLGGPSVFLFPPKPKDTLMISRTPEVTCVVVDVSHEDPEVKFNWYVDGVEVHN |
| | | AKTKPREEQYNSTYRVVSVLTVLHQDWLNGKEYKCKVSNKALPAPIEKTISKA |
| | | KGQPREPQVYTLPPSREEMTKNQVSLTCLVKGFYPSDIAVEWESNGQPENNYK |
| | | TTPPVLDSDGSFFLYSKLTVDKSRWQQGNVFSCSVMHEALHNHYTQKSLSLSP |
| | | G |
| TIGIT-29-21 | 1706 | MKHLWFFLLLVAAPRWVLSEVQLVESGGGLVQAGGSLRLSCAASGSTFSNYAM |
| | | GWFRQAPGKERELVSAITWSSSRTYYADSVKGRFTISADNAKNTVYLQMNSLK |
| | | PEDTAVYYCAAAAWTIYNFEYWGQGTQVTVSSGGGGSEPKSSDKTHTCPPCPA |
| | | PELLGGPSVFLFPPKPKDTLMISRTPEVTCVVVDVSHEDPEVKFNWYVDGVEV |
| | | HNAKTKPREEQYNSTYRVVSVLTVLHQDWLNGKEYKCKVSNKALPAPIEKTIS |
| | | KAKGQPREPQVYTLPPSREEMTKNQVSLTCLVKGFYPSDIAVEWESNGQPENN |
| | | YKTTPPVLDSDGSFFLYSKLTVDKSRWQQGNVFSCSVMHEALHNHYTQKSLSL |
| | | SPG |
| TIGIT-29-22 | 1707 | MKHLWFFLLLVAAPRWVLSEVQLVESGGGLVQAGGSLRLSCAASGSILSSYTM |
| | | GWFRQAPGKEREFVSTISRSSTRTYYADSVKGRFTISADNAKNTVYLQMNSLK |
| | | PEDTAVYYCAARLWGTWTAGDYDYWGQGTQVTVSSGGGGSEPKSSDKTHTCPP |
| | | CPAPELLGGPSVFLFPPKPKDTLMISRTPEVTCVVVDVSHEDPEVKFNWYVDG |
| | | VEVHNAKTKPREEQYNSTYRVVSVLTVLHQDWLNGKEYKCKVSNKALPAPIEK |
| | | TISKAKGQPREPQVYTLPPSREEMTKNQVSLTCLVKGFYPSDIAVEWESNGQP |
| | | ENNYKTTPPVLDSDGSFFLYSKLTVDKSRWQQGNVFSCSVMHEALHNHYTQKS |
| | | LSLSPG |
| TIGIT-29-23 | 1708 | MKHLWFFLLLVAAPRWVLSEVQLVESGGGLVQAGGSLRLSCAASGSTFDIYAM |
| | | GWFRQAPGKEREFVASISSGDTNTNYADSVKGRFTISADNAKNTVYLQMNSLK |
| | | HEDTAVYYCAAGRYSGYNSWGQGTQVTVSSGGGGSEPKSSDKTHTCPPCPAPE |
| | | LLGGPSVFLFPPKPKDTLMISRTPEVTCVVVDVSHEDPEVKFNWYVDGVEVHN |
| | | AKTKPREEQYNSTYRVVSVLTVLHQDWLNGKEYKCKVSNKALPAPIEKTISKA |
| | | KGQPREPQVYTLPPSREEMTKNQVSLTCLVKGFYPSDIAVEWESNGQPENNYK |
| | | TTPPVLDSDGSFFLYSKLTVDKSRWQQGNVFSCSVMHEALHNHYTQKSLSLSP |
| | | G |
| TIGIT-29-24 | 1709 | MKHLWFFLLLVAAPRWVLSEVQLVESGGGLVQAGGSLRLSCAASGRTFDTYAM |
| | | GWLRQAPGKEREFVSAISTGDGSTNYADSVKGRFTISADNAKNTVYLQMNSLK |
| | | PEDTAVYYCAAARRSGRGSWGQGTQVTVTSGGGGSEPKSSDKTHTCPPCPAPE |
| | | LLGGPSVFLFPPKPKDTLMISRTPEVTCVVVDVSHEDPEVKFNWYVDGVEVHN |
| | | AKTKPREEQYNSTYRVVSVLTVLHQDWLNGKEYKCKVSNKALPAPIEKTISKA |
| | | KGQPREPQVYTLPPSREEMTKNQVSLTCLVKGFYPSDIAVEWESNGQPENNYK |
| | | TTPPVLDSDGSFFLYSKLTVDKSRWQQGNVFSCSVMHEALHNHYTQKSLSLSP |
| | | G |
| TIGIT-29-25 | 1710 | MKHLWFFLLLVAAPRWVLSEVQLVESGGGLVQAGGSLRLSCAASGFTFDNYAM |
| | | GWFRQAPGKEREGVAAITWSGGRTYYADSVKGRFTISADNAKNTVYLQMNSLK |
| | | PEDTAVYYCAAAAWTIYEYDSWGQGTQVTVTSGGGGSEPKSSDKTHTCPPCPA |
| | | PELLGGPSVFLFPPKPKDTLMISRTPEVTCVVVDVSHEDPEVKFNWYVDGVEV |
| | | HNAKTKPREEQYNSTYRVVSVLTVLHQDWLNGKEYKCKVSNKALPAPIEKTIS |
| | | KAKGQPREPQVYTLPPSREEMTKNQVSLTCLVKGFYPSDIAVEWESNGQPENN |
| | | YKTTPPVLDSDGSFFLYSKLTVDKSRWQQGNVFSCSVMHEALHNHYTQKSLSL |
| | | SPG |
| TIGIT-29-26 | 1711 | MKHLWFFLLLVAAPRWVLSEVQLVESGGGLVQAGGSLRLSCAASGFTFDNYAM |
| | | GWFRQAPGKEREFVATITWSGTRTNYADSVKGRFTISADNAKNTVYLQMNSLK |
| | | PEDTAVYYCAAAAWTIYDYDYWGQGTQVTVSSGGGGSEPKSSDKTHTCPPCPA |
| | | PELLGGPSVFLFPPKPKDTLMISRTPEVTCVVVDVSHEDPEVKFNWYVDGVEV |
| | | HNAKTKPREEQYNSTYRVVSVLTVLHQDWLNGKEYKCKVSNKALPAPIEKTIS |
| | | KAKGQPREPQVYTLPPSREEMTKNQVSLTCLVKGFYPSDIAVEWESNGQPENN |
| | | YKTTPPVLDSDGSFFLYSKLTVDKSRWQQGNVFSCSVMHEALHNHYTQKSLSL |
| | | SPG |
| TIGIT-29-27 | 1712 | MKHLWFFLLLVAAPRWVLSEVQLVESGGGLVQAGGSLRLSCAASGRTFSNNVM |
| | | GWFRQAPGKEREFVAAISWGGASTNYADSVKGRFTISADNAKNTVYLQMNSLK |
| | | PEDTAVYYCAAGPKTPDTRNYWGQGTQVTVSSGGGGSEPKSSDKTHTCPPCPA |
| | | PELLGGPSVFLFPPKPKDTLMISRTPEVTCVVVDVSHEDPEVKFNWYVDGVEV |
| | | HNAKTKPREEQYNSTYRVVSVLTVLHQDWLNGKEYKCKVSNKALPAPIEKTIS |
| | | KAKGQPREPQVYTLPPSREEMTKNQVSLTCLVKGFYPSDIAVEWESNGQPENN |
| | | YKTTPPVLDSDGSFFLYSKLTVDKSRWQQGNVFSCSVMHEALHNHYTQKSLSL |
| | | SPG |
| TIGIT-29-28 | 1713 | MKHLWFFLLLVAAPRWVLSEVQLVESGGGLVQAGGSLRLSCAASGFIFDSYAM |
| | | GWFRQAPGKEREFVAAISWGGSNTNYADSVKGRFTISADNAKNTVYLQMNSLK |
| | | PEDTAVYYCAAVRITDGRDYWGQGTQVTVSSGGGGSEPKSSDKTHTCPPCPAP |
| | | ELLGGPSVFLFPPKPKDTLMISRTPEVTCVVVDVSHEDPEVKFNWYVDGVEVH |
| | | NAKTKPREEQYNSTYRVVSVLTVLHQDWLNGKEYKCKVSNKALPAPIEKTISK |
| | | AKGQPREPQVYTLPPSREEMTKNQVSLTCLVKGFYPSDIAVEWESNGQPENNY |
| | | KTTPPVLDSDGSFFLYSKLTVDKSRWQQGNVFSCSVMHEALHNHYTQKSLSLS |
| | | PG |
| TIGIT-29-29 | 1714 | MKHLWFFLLLVAAPRWVLSEVQLVESGGGLVQAGGSLRLSCAASGRTFSNYAM |
| | | GWFRQAPGKEREFVAAITWSGTRTDYADSVKGRFTISADNAKNTVYLQMNSLK |
| | | PEDTAVYYCAAAAWTIYEYDYWGQGTQVTVSSGGGGSEPKSSDKTHTCPPCPA |
| | | PELLGGPSVFLFPPKPKDTLMISRTPEVTCVVVDVSHEDPEVKFNWYVDGVEV |
| | | HNAKTKPREEQYNSTYRVVSVLTVLHQDWLNGKEYKCKVSNKALPAPIEKTIS |
| | | KAKGQPREPQVYTLPPSREEMTKNQVSLTCLVKGFYPSDIAVEWESNGQPENN |
| | | YKTTPPVLDSDGSFFLYSKLTVDKSRWQQGNVFSCSVMHEALHNHYTQKSLSL |
| | | SPG |
| TIGIT-29-30 | 1715 | MKHLWFFLLLVAAPRWVLSEVQLVESGGGLVQAGGSLRLSCAASGFTFSSYAM |
| | | GWFRQAPGKEREFVAAITWSGTRTDYADSVKGRFTISADNAKNTVYLQMNSLK |
| | | PEDTAVYYCAAAAWRYSEYDYWGQGTQVTVSSGGGGSEPKSSDKTHTCPPCPA |
| | | PELLGGPSVFLFPPKPKDTLMISRTPEVTCVVVDVSHEDPEVKFNWYVDGVEV |
| | | HNAKTKPREEQYNSTYRVVSVLTVLHQDWLNGKEYKCKVSNKALPAPIEKTIS |
| | | KAKGQPREPQVYTLPPSREEMTKNQVSLTCLVKGFYPSDIAVEWESNGQPENN |
| | | YKTTPPVLDSDGSFFLYSKLTVDKSRWQQGNVFSCSVMHEALHNHYTQKSLSL |
| | | SPG |
| TIGIT-29-31 | 1716 | MKHLWFFLLLVAAPRWVLSEVQLVESGGGLVQAGGSLRLSCAASGFTFSIYAM |
| | | GWFRQAPGKEREWVSTISWSGGNTYYADSVKGRFTISADNAKNTVYLQMNSLK |
| | | PEDTAVYYCATRPRFRRYDSWGQGTQVTVSSGGGGSEPKSSDKTHTCPPCPAP |
| | | ELLGGPSVFLFPPKPKDTLMISRTPEVTCVVVDVSHEDPEVKFNWYVDGVEVH |
| | | NAKTKPREEQYNSTYRVVSVLTVLHQDWLNGKEYKCKVSNKALPAPIEKTISK |
| | | AKGQPREPQVYTLPPSREEMTKNQVSLTCLVKGFYPSDIAVEWESNGQPENNY |
| | | KTTPPVLDSDGSFFLYSKLTVDKSRWQQGNVFSCSVMHEALHNHYTQKSLSLS |
| | | PG |
| TIGIT-29-32 | 1717 | MKHLWFFLLLVAAPRWVLSEVQLVESGGGLVQAGGSLRLSCAASGSTFDSYAM |
| | | GWFRQAPGKEREGVAAITTSGSSTYYADSVKGRFTISADNAKNTVYLQMNSLK |
| | | PEDTAVYYCAARGGVRSGSPGTYNYWGQGTQVTVSSGGGGSEPKSSDKTHTCP |
| | | PCPAPELLGGPSVFLFPPKPKDTLMISRTPEVTCVVVDVSHEDPEVKENWYVD |
| | | GVEVHNAKTKPREEQYNSTYRVVSVLTVLHQDWLNGKEYKCKVSNKALPAPIE |
| | | KTISKAKGQPREPQVYTLPPSREEMTKNQVSLTCLVKGFYPSDIAVEWESNGQ |
| | | PENNYKTTPPVLDSDGSFFLYSKLTVDKSRWQQGNVFSCSVMHEALHNHYTQK |
| | | SLSLSPG |
| TIGIT-29-33 | 1718 | MKHLWFFLLLVAAPRWVLSEVQLVESGGGLVQAGGSLRLSCAASGFIFSTYAM |
| | | GWFRQAPGKERELVSAITRSGITTYYADSVKGRFTISADNAKNTVYLQMNSLK |
| | | PEDTAVYYCAAAAWTIYEYDYWGQGTQVTVSSGGGGSEPKSSDKTHTCPPCPA |
| | | PELLGGPSVFLFPPKPKDTLMISRTPEVTCVVVDVSHEDPEVKFNWYVDGVEV |
| | | HNAKTKPREEQYNSTYRVVSVLTVLHQDWLNGKEYKCKVSNKALPAPIEKTIS |
| | | KAKGQPREPQVYTLPPSREEMTKNQVSLTCLVKGFYPSDIAVEWESNGQPENN |
| | | YKTTPPVLDSDGSFFLYSKLTVDKSRWQQGNVFSCSVMHEALHNHYTQKSLSL |
| | | SPG |
| TIGIT-29-34 | 1719 | MKHLWFFLLLVAAPRWVLSEVQLVESGGGLVQAGGSLRLSCAASGFTFRNYAM |
| | | GWFRQAPGKEREFVSSISSSSSRTSYADSVKGRFTISADNAKNTVYLQMNSLK |
| | | PEDTAVYYCAARLWGTWTAGDYDYWGQGTQVTVSSGGGGSEPKSSDKTHTCPP |
| | | CPAPELLGGPSVFLFPPKPKDTLMISRTPEVTCVVVDVSHEDPEVKFNWYVDG |
| | | VEVHNAKTKPREEQYNSTYRVVSVLTVLHQDWLNGKEYKCKVSNKALPAPIEK |
| | | TISKAKGQPREPQVYTLPPSREEMTKNQVSLTCLVKGFYPSDIAVEWESNGQP |
| | | ENNYKTTPPVLDSDGSFFLYSKLTVDKSRWQQGNVFSCSVMHEALHNHYTQKS |
| | | LSLSPG |
| TIGIT-29-35 | 1720 | MKHLWFFLLLVAAPRWVLSEVQLVESGGGLVQAGGSLRLSCAASGRIFSIYTM |
| | | GWFRQAPGKEREWVATINSSGSRTYYADSVKGRFTISADNAKNTVYLQMNSLK |
| | | PEDTAVYYCAARPSYNRYDSWGQGTQVTVSSGGGGSEPKSSDKTHTCPPCPAP |
| | | ELLGGPSVFLFPPKPKDTLMISRTPEVTCVVVDVSHEDPEVKFNWYVDGVEVH |
| | | NAKTKPREEQYNSTYRVVSVLTVLHQDWLNGKEYKCKVSNKALPAPIEKTISK |
| | | AKGQPREPQVYTLPPSREEMTKNQVSLTCLVKGFYPSDIAVEWESNGQPENNY |
| | | KTTPPVLDSDGSFFLYSKLTVDKSRWQQGNVFSCSVMHEALHNHYTQKSLSLS |
| | | PG |
| TIGIT-29-36 | 1721 | MKHLWFFLLLVAAPRWVLSEVQLVESGGGLVQAGGSLRLSCAASGFTFSSYAM |
| | | GWFRQAPGKEREFVASITWSGTSTNYADSVKGRFTISADNAKNTVYLQMNSLK |
| | | PEDTAVYYCAAAAWTIYAYDYWGQGTQVTVSSGGGGSEPKSSDKTHTCPPCPA |
| | | PELLGGPSVFLFPPKPKDTLMISRTPEVTCVVVDVSHEDPEVKENWYVDGVEV |
| | | HNAKTKPREEQYNSTYRVVSVLTVLHQDWLNGKEYKCKVSNKALPAPIEKTIS |
| | | KAKGQPREPQVYTLPPSREEMTKNQVSLTCLVKGFYPSDIAVEWESNGQPENN |
| | | YKTTPPVLDSDGSFFLYSKLTVDKSRWQQGNVFSCSVMHEALHNHYTQKSLSL |
| | | SPG |
| TIGIT-29-37 | 1722 | MKHLWFFLLLVAAPRWVLSEVQLVESGGGLVQAGGSLRLSCAASGRTFSNYAM |
| | | GWFRQAPGKEREFVAGISWSGTRTYYADSVKGRFTISADNAKNTVYLQMNSLK |
| | | PEDTAVYYCAAAAWTIYEYDYWGQGTQVTVSSGGGGSEPKSSDKTHTCPPCPA |
| | | PELLGGPSVFLFPPKPKDTLMISRTPEVTCVVVDVSHEDPEVKFNWYVDGVEV |
| | | HNAKTKPREEQYNSTYRVVSVLTVLHQDWLNGKEYKCKVSNKALPAPIEKTIS |
| | | KAKGQPREPQVYTLPPSREEMTKNQVSLTCLVKGFYPSDIAVEWESNGQPENN |
| | | YKTTPPVLDSDGSFFLYSKLTVDKSRWQQGNVFSCSVMHEALHNHYTQKSLSL |
| | | SPG |
| TIGIT-29-38 | 1723 | MKHLWFFLLLVAAPRWVLSEVQLVESGGGLVQAGGSLRLSCAASGSTFSSYAM |
| | | GWFRQAPGKEREFVSAISRNGASTSYADSVKGRFTISADNAKNTVYLQMNSLK |
| | | PEDTAVYYCAAAGTRFDYWGQGTQVTVSSGGGGSEPKSSDKTHTCPPCPAPEL |
| | | LGGPSVFLFPPKPKDTLMISRTPEVTCVVVDVSHEDPEVKFNWYVDGVEVHNA |
| | | KTKPREEQYNSTYRVVSVLTVLHQDWLNGKEYKCKVSNKALPAPIEKTISKAK |
| | | GQPREPQVYTLPPSREEMTKNQVSLTCLVKGFYPSDIAVEWESNGQPENNYKT |
| | | TPPVLDSDGSFFLYSKLTVDKSRWQQGNVFSCSVMHEALHNHYTQKSLSLSPG |
| TIGIT-29-39 | 1724 | MKHLWFFLLLVAAPRWVLSEVQLVESGGGLVQAGGSLRLSCAASGRTLDDYVM |
| | | GWFRQAPGKEREGVATISGGGDTTYYADSVKGRFTISADNAKNTVYLQMNSLK |
| | | PEDTAVYYCAAVPWRWTTRRDYWGQGTQVTVSSGGGGSEPKSSDKTHTCPPCP |
| | | APELLGGPSVFLFPPKPKDTLMISRTPEVTCVVVDVSHEDPEVKFNWYVDGVE |
| | | VHNAKTKPREEQYNSTYRVVSVLTVLHQDWLNGKEYKCKVSNKALPAPIEKTI |
| | | SKAKGQPREPQVYTLPPSREEMTKNQVSLTCLVKGFYPSDIAVEWESNGQPEN |
| | | NYKTTPPVLDSDGSFFLYSKLTVDKSRWQQGNVFSCSVMHEALHNHYTQKSLS |
| | | LSPG |
| TIGIT-29-40 | 1725 | MKHLWFFLLLVAAPRWVLSEVQLVESGGGLVQAGGSLRLSCAASGFTFDNYAM |
| | | GWFRQAPGKEREFVATITWSGTRTNYADSVKGRFTISADNAKNTVYLQMNSLK |
| | | PEDTAVYYCAAAAWTIYDYDYWGQGTQVTVSSGGGGSEPKSSDKTHTCPPCPA |
| | | PELLGGPSVFLFPPKPKDTLMISRTPEVTCVVVDVSHEDPEVKFNWYVDGVEV |
| | | HNAKTKPREEQYNSTYRVVSVLTVLHQDWLNGKEYKCKVSNKALPAPIEKTIS |
| | | KAKGQPREPQVYTLPPSREEMTKNQVSLTCLVKGFYPSDIAVEWESNGQPENN |
| | | YKTTPPVLDSDGSFFLYSKLTVDKSRWQQGNVFSCSVMHEALHNHYTQKSLSL |
| | | SPG |
| TIGIT-29-41 | 1726 | MKHLWFFLLLVAAPRWVLSEVQLVESGGGLVQAGGSLRLSCAASGRTESTNAM |
| | | GWFRQAPGKEREWVTAITTSGGNTYYADSVKGRFTISADNAKNTVYLQMNSLK |
| | | PEDTAVYYCAARDETYGTYDYWGQGTQVTVSSGGGGSEPKSSDKTHTCPPCPA |
| | | PELLGGPSVFLFPPKPKDTLMISRTPEVTCVVVDVSHEDPEVKFNWYVDGVEV |
| | | HNAKTKPREEQYNSTYRVVSVLTVLHQDWLNGKEYKCKVSNKALPAPIEKTIS |
| | | KAKGQPREPQVYTLPPSREEMTKNQVSLTCLVKGFYPSDIAVEWESNGQPENN |
| | | YKTTPPVLDSDGSFFLYSKLTVDKSRWQQGNVFSCSVMHEALHNHYTQKSLSL |
| | | SPG |
| TIGIT-29-42 | 1727 | MKHLWFFLLLVAAPRWVLSEVQLVESGGGLVQAGGSLRLSCAASGSTESTYAM |
| | | GWFRQAPGKEREFVATISTSSSRTYYADSVKGRFTISADNAKNTVYLQMNSLK |
| | | PEDTAVYYCAARLWGTWTAGDYDYWGQGTQVTVSLGGGGSEPKSSDKTHTCPP |
| | | CPAPELLGGPSVFLFPPKPKDTLMISRTPEVTCVVVDVSHEDPEVKENWYVDG |
| | | VEVHNAKTKPREEQYNSTYRVVSVLTVLHQDWLNGKEYKCKVSNKALPAPIEK |
| | | TISKAKGQPREPQVYTLPPSREEMTKNQVSLTCLVKGFYPSDIAVEWESNGQP |
| | | ENNYKTTPPVLDSDGSFFLYSKLTVDKSRWQQGNVFSCSVMHEALHNHYTQKS |
| | | LSLSPG |
| TIGIT-29-43 | 1728 | MKHLWFFLLLVAAPRWVLSEVQLVESGGGLVQAGGSLRLSCAASGRTFDSYAM |
| | | GWFRQAPGKEREWVSAISWSGSSTYYADSVKGRFTISADNAKNTVYLQMNSLK |
| | | PEDTAVYYCAARGGYGRYDSWGQGTQVTVTSGGGGSEPKSSDKTHTCPPCPAP |
| | | ELLGGPSVFLFPPKPKDTLMISRTPEVTCVVVDVSHEDPEVKFNWYVDGVEVH |
| | | NAKTKPREEQYNSTYRVVSVLTVLHQDWLNGKEYKCKVSNKALPAPIEKTISK |
| | | AKGQPREPQVYTLPPSREEMTKNQVSLTCLVKGFYPSDIAVEWESNGQPENNY |
| | | KTTPPVLDSDGSFFLYSKLTVDKSRWQQGNVFSCSVMHEALHNHYTQKSLSLS |
| | | PG |
| TIGIT-29-44 | 1729 | MKHLWFFLLLVAAPRWVLSEVQLVESGGGLVQAGGSLRLSCAASGFTFDNYAM |
| | | GWFRQAPGKEREFVATITWSGTTTNYADSVKGRFTISADNAKNTVYLQMNSLK |
| | | PEDTAVYYCAAAAWTIYDYDYWGQGTQVTVSSGGGGSEPKSSDKTHTCPPCPA |
| | | PELLGGPSVFLFPPKPKDTLMISRTPEVTCVVVDVSHEDPEVKFNWYVDGVEV |
| | | HNAKTKPREEQYNSTYRVVSVLTVLHQDWLNGKEYKCKVSNKALPAPIEKTIS |
| | | KAKGQPREPQVYTLPPSREEMTKNQVSLTCLVKGFYPSDIAVEWESNGQPENN |
| | | YKTTPPVLDSDGSFFLYSKLTVDKSRWQQGNVFSCSVMHEALHNHYTQKSLSL |
| | | SPG |
| TIGIT-29-45 | 1730 | MKHLWFFLLLVAAPRWVLSEVQLVESGGGLVQAGGSLRLSCAASGFTFSSYAM |
| | | GWFRQAPGKEREFVASITWSGTRTDYADSVKGRFTISADNAKNTVYLQMNSLK |
| | | PEDTAVYYCAAAAWTIYGYEYWGQGTQVTVSSGGGGSEPKSSDKTHTCPPCPA |
| | | PELLGGPSVFLFPPKPKDTLMISRTPEVTCVVVDVSHEDPEVKFNWYVDGVEV |
| | | HNAKTKPREEQYNSTYRVVSVLTVLHQDWLNGKEYKCKVSNKALPAPIEKTIS |
| | | KAKGQPREPQVYTLPPSREEMTKNQVSLTCLVKGFYPSDIAVEWESNGQPENN |
| | | YKTTPPVLDSDGSFFLYSKLTVDKSRWQQGNVFSCSVMHEALHNHYTQKSLSL |
| | | SPG |
| TIGIT-29-46 | 1731 | MKHLWFFLLLVAAPRWVLSEVQLVESGGGLVQAGGSLRLSCAASGSTFDIYAM |
| | | GWFRQAPGKEREFVASISSGDTNTYYADSVKGRFTISADNAKNTVYLQMNSLK |
| | | HEDTAVYYCAAGRYSGYNSWGQGTQVTVSSGGGGSEPKSSDKTHTCPPCPAPE |
| | | LLGGPSVFLFPPKPKDTLMISRTPEVTCVVVDVSHEDPEVKFNWYVDGVEVHN |
| | | AKTKPREEQYNSTYRVVSVLTVLHQDWLNGKEYKCKVSNKALPAPIEKTISKA |
| | | KGQPREPQVYTLPPSREEMTKNQVSLTCLVKGFYPSDIAVEWESNGQPENNYK |
| | | TTPPVLDSDGSFFLYSKLTVDKSRWQQGNVFSCSVMHEALHNHYTQKSLSLSP |
| | | G |
| TIGIT-29-47 | 1732 | MKHLWFFLLLVAAPRWVLSEVQLVESGGGLVQAGGSLRLSCAASGSTLSSYAM |
| | | GWFRQAPGKERELVAAITGSGGRTYYADSVKGRFTISADNAKNTVYLQMNSLK |
| | | PEDTAVYYCAANRRYSFPYWSFWYDDFDYWGQGTQVTVSSGGGGSEPKSSDKT |
| | | HTCPPCPAPELLGGPSVFLFPPKPKDTLMISRTPEVTCVVVDVSHEDPEVKFN |
| | | WYVDGVEVHNAKTKPREEQYNSTYRVVSVLTVLHQDWLNGKEYKCKVSNKALP |
| | | APIEKTISKAKGQPREPQVYTLPPSREEMTKNQVSLTCLVKGFYPSDIAVEWE |
| | | SNGQPENNYKTTPPVLDSDGSFFLYSKLTVDKSRWQQGNVFSCSVMHEALHNH |
| | | YTQKSLSLSPG |
| TIGIT-30-01 | 1733 | MKHLWFFLLLVAAPRWVLSEVQLVESGGGLVQAGGSLRLSCAASGFAFSSYWM |
| | | GWFRQAPGKERELVAARNSGGNTNYADSVKGRFTISADNAKNTVYLQMNSLKP |
| | | EDTAVYYCAADVWYGSTWRNWGQGTQVTVSSGGGGSEPKSSDKTHTCPPCPAP |
| | | ELLGGPSVFLFPPKPKDTLMISRTPEVTCVVVDVSHEDPEVKFNWYVDGVEVH |
| | | NAKTKPREEQYNSTYRVVSVLTVLHQDWLNGKEYKCKVSNKALPAPIEKTISK |
| | | AKGQPREPQVYTLPPSREEMTKNQVSLTCLVKGFYPSDIAVEWESNGQPENNY |
| | | KTTPPVLDSDGSFFLYSKLTVDKSRWQQGNVFSCSVMHEALHNHYTQKSLSLS |
| | | PG |
| TIGIT-30-02 | 1734 | MKHLWFFLLLVAAPRWVLSEVQLVESGGGLVQAGGSLRLSCAASGRTFGDYIM |
| | | GWFRQAPGKERELVATISGGGSTNYADSVKGRFTISADNAKNTVYLQMNSLKP |
| | | EDTAVYYCAAVFSRGPLTWGQGTQVTVSSGGGGSEPKSSDKTHTCPPCPAPEL |
| | | LGGPSVFLFPPKPKDTLMISRTPEVTCVVVDVSHEDPEVKFNWYVDGVEVHNA |
| | | KTKPREEQYNSTYRVVSVLTVLHQDWLNGKEYKCKVSNKALPAPIEKTISKAK |
| | | GQPREPQVYTLPPSREEMTKNQVSLTCLVKGFYPSDIAVEWESNGQPENNYKT |
| | | TPPVLDSDGSFFLYSKLTVDKSRWQQGNVFSCSVMHEALHNHYTQKSLSLSPG |
| TIGIT-30-03 | 1735 | MKHLWFFLLLVAAPRWVLSEVQLVESGGGLVQAGGSLRLSCAASGNIFSRYIM |
| | | GWFRQAPGKEREWVAGISNGGTTKYADSVKGRFTISADNAKNTVYLQMNSLKP |
| | | EDTAVYYCAQGWKIRPTIWGQGTQVTVSSGGGGSEPKSSDKTHTCPPCPAPEL |
| | | LGGPSVFLFPPKPKDTLMISRTPEVTCVVVDVSHEDPEVKFNWYVDGVEVHNA |
| | | KTKPREEQYNSTYRVVSVLTVLHQDWLNGKEYKCKVSNKALPAPIEKTISKAK |
| | | GQPREPQVYTLPPSREEMTKNQVSLTCLVKGFYPSDIAVEWESNGQPENNYKT |
| | | TPPVLDSDGSFFLYSKLTVDKSRWQQGNVFSCSVMHEALHNHYTQKSLSLSPG |
| TIGIT-30-04 | 1736 | MKHLWFFLLLVAAPRWVLSEVQLVESGGGLVQAGGSLRLSCAASGFTFSTHWM |
| | | GWFRQAPGKERELVAARNSGGNTNYADSVKGRFTISADNAKNTVYLQMNSLKP |
| | | EDTAVYYCAADVWYGSTWRNWGQGTQVTVSSGGGGSEPKSSDKTHTCPPCPAP |
| | | ELLGGPSVFLFPPKPKDTLMISRTPEVTCVVVDVSHEDPEVKFNWYVDGVEVH |
| | | NAKTKPREEQYNSTYRVVSVLTVLHQDWLNGKEYKCKVSNKALPAPIEKTISK |
| | | AKGQPREPQVYTLPPSREEMTKNQVSLTCLVKGFYPSDIAVEWESNGQPENNY |
| | | KTTPPVLDSDGSFFLYSKLTVDKSRWQQGNVFSCSVMHEALHNHYTQKSLSLS |
| | | PG |
| TIGIT-30-5 | 1737 | MKHLWFFLLLVAAPRWVLSEVQLVESGGGLVQAGGSLRLSCAASGGTFRNYGM |
| | | GWFRQAPGKERELVAAISWSGVSTIYADSVKGRFTISADNAKNTVYLQMNSLK |
| | | PEDTAVYYCASSPYGPLYRSTHYYDWGQGTQVTVSSGGGGSEPKSSDKTHTCP |
| | | PCPAPELLGGPSVFLFPPKPKDTLMISRTPEVTCVVVDVSHEDPEVKFNWYVD |
| | | GVEVHNAKTKPREEQYNSTYRVVSVLTVLHQDWLNGKEYKCKVSNKALPAPIE |
| | | KTISKAKGQPREPQVYTLPPSREEMTKNQVSLTCLVKGFYPSDIAVEWESNGQ |
| | | PENNYKTTPPVLDSDGSFFLYSKLTVDKSRWQQGNVFSCSVMHEALHNHYTQK |
| | | SLSLSPG |
| TIGIT-30-6 | 1738 | MKHLWFFLLLVAAPRWVLSEVQLVESGGGLVQAGGSLRLSCAASGRFSRINSM |
| | | GWFRQAPGKERELVAHIFRSGITSYASYADSVKGRFTISADNAKNTVYLQMNS |
| | | LKPEDTAVYYCAIGRGSWGQGTQVTVSSGGGGSEPKSSDKTHTCPPCPAPELL |
| | | GGPSVFLFPPKPKDTLMISRTPEVTCVVVDVSHEDPEVKFNWYVDGVEVHNAK |
| | | TKPREEQYNSTYRVVSVLTVLHQDWLNGKEYKCKVSNKALPAPIEKTISKAKG |
| | | QPREPQVYTLPPSREEMTKNQVSLTCLVKGFYPSDIAVEWESNGQPENNYKTT |
| | | PPVLDSDGSFFLYSKLTVDKSRWQQGNVFSCSVMHEALHNHYTQKSLSLSPG |
| TIGIT-30-7 | 1739 | MKHLWFFLLLVAAPRWVLSEVQLVESGGGLVQAGGSLRLSCAASGIPASIRTM |
| | | GWFRQAPGKEREGISLITSDDGSTYYADSVKGRFTISADNAKNTVYLQMNSLK |
| | | PEDTAVYYCAWTTNRGMDWGQGTQVTVSSGGGGSEPKSSDKTHTCPPCPAPEL |
| | | LGGPSVFLFPPKPKDTLMISRTPEVTCVVVDVSHEDPEVKFNWYVDGVEVHNA |
| | | KTKPREEQYNSTYRVVSVLTVLHQDWLNGKEYKCKVSNKALPAPIEKTISKAK |
| | | GQPREPQVYTLPPSREEMTKNQVSLTCLVKGFYPSDIAVEWESNGQPENNYKT |
| | | TPPVLDSDGSFFLYSKLTVDKSRWQQGNVFSCSVMHEALHNHYTQKSLSLSPG |
| TIGIT-30-8 | 1740 | MKHLWFFLLLVAAPRWVLSEVQLVESGGGLVQAGGSLRLSCAASGFTMSSSWM |
| | | GWFRQAPGKEREFVATLTSGGSTNYADSVKGRFTISADNAKNTVYLQMNSLKP |
| | | EDTAVYYCAADVWYGSTWRNWGQGTQVTVSSGGGGSEPKSSDKTHTCPPCPAP |
| | | ELLGGPSVFLFPPKPKDTLMISRTPEVTCVVVDVSHEDPEVKFNWYVDGVEVH |
| | | NAKTKPREEQYNSTYRVVSVLTVLHQDWLNGKEYKCKVSNKALPAPIEKTISK |
| | | AKGQPREPQVYTLPPSREEMTKNQVSLTCLVKGFYPSDIAVEWESNGQPENNY |
| | | KTTPPVLDSDGSFFLYSKLTVDKSRWQQGNVFSCSVMHEALHNHYTQKSLSLS |
| | | PG |
| TIGIT-30-9 | 1741 | MKHLWFFLLLVAAPRWVLSEVQLVESGGGLVQAGGSLRLSCAASGPISGINRM |
| | | GWFRQAPGKEREWVSTITFNGDHTYYADSVKGRFTISADNAKNTVYLQMNSLK |
| | | PEDTAVYYCAARPYTRPGSMWVSSLYDWGQGTQVTVSSGGGGSEPKSSDKTHT |
| | | CPPCPAPELLGGPSVFLFPPKPKDTLMISRTPEVTCVVVDVSHEDPEVKFNWY |
| | | VDGVEVHNAKTKPREEQYNSTYRVVSVLTVLHQDWLNGKEYKCKVSNKALPAP |
| | | IEKTISKAKGQPREPQVYTLPPSREEMTKNQVSLTCLVKGFYPSDIAVEWESN |
| | | GQPENNYKTTPPVLDSDGSFFLYSKLTVDKSRWQQGNVFSCSVMHEALHNHYT |
| | | QKSLSLSPG |
| TIGIT-30-10 | 1742 | MKHLWFFLLLVAAPRWVLSEVQLVESGGGLVQAGGSLRLSCAASVRTFSLSDM |
| | | GWFRQAPGKEREFVGAINWLSESTYYADSVKGRFTISADNAKNTVYLQMNSLK |
| | | PEDTAVYYCAAQGGVLSGWDWGQGTQVTVSSGGGGSEPKSSDKTHTCPPCPAP |
| | | ELLGGPSVFLFPPKPKDTLMISRTPEVTCVVVDVSHEDPEVKFNWYVDGVEVH |
| | | NAKTKPREEQYNSTYRVVSVLTVLHQDWLNGKEYKCKVSNKALPAPIEKTISK |
| | | AKGQPREPQVYTLPPSREEMTKNQVSLTCLVKGFYPSDIAVEWESNGQPENNY |
| | | KTTPPVLDSDGSFFLYSKLTVDKSRWQQGNVFSCSVMHEALHNHYTQKSLSLS |
| | | PG |
| TIGIT-30-11 | 1743 | MKHLWFFLLLVAAPRWVLSEVQLVESGGGLVQAGGSLRLSCAASGSITSIRSM |
| | | GWFRQAPGKEREWVSSVYIFGGSTYYADSVKGRFTISADNAKNTVYLQMNSLK |
| | | PEDTAVYYCANSNKPKFDWGQGTQVTVSSGGGGSEPKSSDKTHTCPPCPAPEL |
| | | LGGPSVFLFPPKPKDTLMISRTPEVTCVVVDVSHEDPEVKFNWYVDGVEVHNA |
| | | KTKPREEQYNSTYRVVSVLTVLHQDWLNGKEYKCKVSNKALPAPIEKTISKAK |
| | | GQPREPQVYTLPPSREEMTKNQVSLTCLVKGFYPSDIAVEWESNGQPENNYKT |
| | | TPPVLDSDGSFFLYSKLTVDKSRWQQGNVFSCSVMHEALHNHYTQKSLSLSPG |
| TIGIT-30-12 | 1744 | MKHLWFFLLLVAAPRWVLSEVQLVESGGGLVQAGGSLRLSCAASGRTFGDYIM |
| | | GWFRQAPGKERELVASVSGGGNSDYADSVKGRFTISADNAKNTVYLQMNSLKP |
| | | EDTAVYYCAAVFSRGPLTWGQGTQVTVSSGGGGSEPKSSDKTHTCPPCPAPEL |
| | | LGGPSVFLFPPKPKDTLMISRTPEVTCVVVDVSHEDPEVKFNWYVDGVEVHNA |
| | | KTKPREEQYNSTYRVVSVLTVLHQDWLNGKEYKCKVSNKALPAPIEKTISKAK |
| | | GQPREPQVYTLPPSREEMTKNQVSLTCLVKGFYPSDIAVEWESNGQPENNYKT |
| | | TPPVLDSDGSFFLYSKLTVDKSRWQQGNVFSCSVMHEALHNHYTQKSLSLSPG |
| TIGIT-30-13 | 1745 | MKHLWFFLLLVAAPRWVLSEVQLVESGGGLVQAGGSLRLSCAASGRTFSNYFM |
| | | GWFRQAPGKERESVAAINWDSARTYYADSVKGRFTISADNAKNTVYLQMNSLK |
| | | PEDTAVYYCASAGRWGQGTQVTVSSGGGGSEPKSSDKTHTCPPCPAPELLGGP |
| | | SVFLFPPKPKDTLMISRTPEVTCVVVDVSHEDPEVKFNWYVDGVEVHNAKTKP |
| | | REEQYNSTYRVVSVLTVLHQDWLNGKEYKCKVSNKALPAPIEKTISKAKGQPR |
| | | EPQVYTLPPSREEMTKNQVSLTCLVKGFYPSDIAVEWESNGQPENNYKTTPPV |
| | | LDSDGSFFLYSKLTVDKSRWQQGNVFSCSVMHEALHNHYTQKSLSLSPG |
| TIGIT-30-14 | 1746 | MKHLWFFLLLVAAPRWVLSEVQLVESGGGLVQAGGSLRLSCAASGPTFSIYDM |
| | | GWFRQAPGKEREFVAAITWNSGRTNYADSVKGRFTISADNAKNTVYLQMNSLK |
| | | PEDTAVYYCAAGAWSSLRKTAASWGQGTQVTVSSGGGGSEPKSSDKTHTCPPC |
| | | PAPELLGGPSVFLFPPKPKDTLMISRTPEVTCVVVDVSHEDPEVKFNWYVDGV |
| | | EVHNAKTKPREEQYNSTYRVVSVLTVLHQDWLNGKEYKCKVSNKALPAPIEKT |
| | | ISKAKGQPREPQVYTLPPSREEMTKNQVSLTCLVKGFYPSDIAVEWESNGQPE |
| | | NNYKTTPPVLDSDGSFFLYSKLTVDKSRWQQGNVFSCSVMHEALHNHYTQKSL |
| | | SLSPG |
| TIGIT-30-15 | 1747 | MKHLWFFLLLVAAPRWVLSEVQLVESGGGLVQAGGSLRLSCAASGFTFSGNWM |
| | | GWFRQAPGKEREWVSGISSGGGRTYYADSVKGRFTISADNAKNTVYLQMNSLK |
| | | PEDTAVYYCAADVWYGSTWRNWGQGTQVTVSSGGGGSEPKSSDKTHTCPPCPA |
| | | PELLGGPSVFLFPPKPKDTLMISRTPEVTCVVVDVSHEDPEVKFNWYVDGVEV |
| | | HNAKTKPREEQYNSTYRVVSVLTVLHQDWLNGKEYKCKVSNKALPAPIEKTIS |
| | | KAKGQPREPQVYTLPPSREEMTKNQVSLTCLVKGFYPSDIAVEWESNGQPENN |
| | | YKTTPPVLDSDGSFFLYSKLTVDKSRWQQGNVFSCSVMHEALHNHYTQKSLSL |
| | | SPG |
| TIGIT-30-16 | 1748 | MKHLWFFLLLVAAPRWVLSEVQLVESGGGLVQAGGSLRLSCAASGFPFSEYPM |
| | | GWFRQAPGKEREFVAVVNWNGDSTYYADSVKGRFTISADNAKNTVYLQMNSLK |
| | | PEDTAVYYCANFNRDWGQGTQVTVSSGGGGSEPKSSDKTHTCPPCPAPELLGG |
| | | PSVFLFPPKPKDTLMISRTPEVTCVVVDVSHEDPEVKFNWYVDGVEVHNAKTK |
| | | PREEQYNSTYRVVSVLTVLHQDWLNGKEYKCKVSNKALPAPIEKTISKAKGQP |
| | | REPQVYTLPPSREEMTKNQVSLTCLVKGFYPSDIAVEWESNGQPENNYKTTPP |
| | | VLDSDGSFFLYSKLTVDKSRWQQGNVFSCSVMHEALHNHYTQKSLSLSPG |
| TIGIT-30-17 | 1749 | MKHLWFFLLLVAAPRWVLSEVQLVESGGGLVQAGGSLRLSCAASGSIFNIGMG |
| | | WFRQAPGKEREWVSSIYSNGHTYYADSVKGRFTISADNAKNTVYLQMNSLKPE |
| | | DTAVYYCANSNKPKFDWGQGTQVTVSSGGGGSEPKSSDKTHTCPPCPAPELLG |
| | | GPSVFLFPPKPKDTLMISRTPEVTCVVVDVSHEDPEVKFNWYVDGVEVHNAKT |
| | | KPREEQYNSTYRVVSVLTVLHQDWLNGKEYKCKVSNKALPAPIEKTISKAKGQ |
| | | PREPQVYTLPPSREEMTKNQVSLTCLVKGFYPSDIAVEWESNGQPENNYKTTP |
| | | PVLDSDGSFFLYSKLTVDKSRWQQGNVFSCSVMHEALHNHYTQKSLSLSPG |
| TIGIT-30-18 | 1750 | MKHLWFFLLLVAAPRWVLSEVQLVESGGGLVQAGGSLRLSCAASGRAFSLRTM |
| | | GWFRQAPGKEREGISLITSDDGSTYYADSVKGRFTISADNAKNTVYLQMNSLK |
| | | PEDTAVYYCAWTTNRGMDWGQGTQVTVSSGGGGSEPKSSDKTHTCPPCPAPEL |
| | | LGGPSVFLFPPKPKDTLMISRTPEVTCVVVDVSHEDPEVKFNWYVDGVEVHNA |
| | | KTKPREEQYNSTYRVVSVLTVLHQDWLNGKEYKCKVSNKALPAPIEKTISKAK |
| | | GQPREPQVYTLPPSREEMTKNQVSLTCLVKGFYPSDIAVEWESNGQPENNYKT |
| | | TPPVLDSDGSFFLYSKLTVDKSRWQQGNVFSCSVMHEALHNHYTQKSLSLSPG |
| TIGIT-30-19 | 1751 | MKHLWFFLLLVAAPRWVLSEVQLVESGGGLVQAGGSLRLSCAASGRTFSSYAM |
| | | MGWFRQAPGKEREFLAIITDGSKTLYADSVKGRFTISADNAKNTVYLQMNSLK |
| | | PEDTAVYYCAAQFTLARHLVWGQGTQVTVSSGGGGSEPKSSDKTHTCPPCPAP |
| | | ELLGGPSVFLFPPKPKDTLMISRTPEVTCVVVDVSHEDPEVKFNWYVDGVEVH |
| | | NAKTKPREEQYNSTYRVVSVLTVLHQDWLNGKEYKCKVSNKALPAPIEKTISK |
| | | AKGQPREPQVYTLPPSREEMTKNQVSLTCLVKGFYPSDIAVEWESNGQPENNY |
| | | KTTPPVLDSDGSFFLYSKLTVDKSRWQQGNVFSCSVMHEALHNHYTQKSLSLS |
| | | PG |
| TIGIT-30-20 | 1752 | MKHLWFFLLLVAAPRWVLSEVQLVESGGGLVQAGGSLRLSCAASGPTFSIYDM |
| | | GWFRQAPGKEREFVAVINWSRGSTFYADSVKGRFTISADNAKNTVYLQMNSLK |
| | | PEDTAVYYCAAGVWSSLRHTAANWGQGTQVTVSSGGGGSEPKSSDKTHTCPPC |
| | | PAPELLGGPSVFLFPPKPKDTLMISRTPEVTCVVVDVSHEDPEVKFNWYVDGV |
| | | EVHNAKTKPREEQYNSTYRVVSVLTVLHQDWLNGKEYKCKVSNKALPAPIEKT |
| | | ISKAKGQPREPQVYTLPPSREEMTKNQVSLTCLVKGFYPSDIAVEWESNGQPE |
| | | NNYKTTPPVLDSDGSFFLYSKLTVDKSRWQQGNVFSCSVMHEALHNHYTQKSL |
| | | SLSPG |
| TIGIT-30-21 | 1753 | MKHLWFFLLLVAAPRWVLSEVQLVESGGGLVQAGGSLRLSCAASGFTFSTSWM |
| | | GWFRQAPGKERELVATINSGGGTNYADSVKGRFTISADNAKNTVYLQMNSLKP |
| | | EDTAVYYCAADVWYGSTWRNWGQGTQVTVSSGGGGSEPKSSDKTHTCPPCPAP |
| | | ELLGGPSVFLFPPKPKDTLMISRTPEVTCVVVDVSHEDPEVKENWYVDGVEVH |
| | | NAKTKPREEQYNSTYRVVSVLTVLHQDWLNGKEYKCKVSNKALPAPIEKTISK |
| | | AKGQPREPQVYTLPPSREEMTKNQVSLTCLVKGFYPSDIAVEWESNGQPENNY |
| | | KTTPPVLDSDGSFFLYSKLTVDKSRWQQGNVFSCSVMHEALHNHYTQKSLSLS |
| | | PG |
| TIGIT-30-22 | 1754 | MKHLWFFLLLVAAPRWVLSEVQLVESGGGLVQAGGSLRLSCAASGFTLSGNWM |
| | | GWFRQAPGKEREFVASISSSGVSKHYADSVKGRFTISADNAKNTVYLQMNSLK |
| | | PEDTAVYYCAADVWYGSTWRNWGRGTQVTVSSGGGGSEPKSSDKTHTCPPCPA |
| | | PELLGGPSVFLFPPKPKDTLMISRTPEVTCVVVDVSHEDPEVKFNWYVDGVEV |
| | | HNAKTKPREEQYNSTYRVVSVLTVLHQDWLNGKEYKCKVSNKALPAPIEKTIS |
| | | KAKGQPREPQVYTLPPSREEMTKNQVSLTCLVKGFYPSDIAVEWESNGQPENN |
| | | YKTTPPVLDSDGSFFLYSKLTVDKSRWQQGNVFSCSVMHEALHNHYTQKSLSL |
| | | SPG |
| TIGIT-30-23 | 1755 | MKHLWFFLLLVAAPRWVLSEVQLVESGGGLVQAGGSLRLSCAASGRAFRRYTM |
| | | GWFRQAPGKEREFVAAIRWSGGTTFYADSVKGRFTISADNAKNTVYLQMNSLK |
| | | PEDTAVYYCAAEWAAMKDWGQGTQVTVSSGGGGSEPKSSDKTHTCPPCPAPEL |
| | | LGGPSVFLFPPKPKDTLMISRTPEVTCVVVDVSHEDPEVKENWYVDGVEVHNA |
| | | KTKPREEQYNSTYRVVSVLTVLHQDWLNGKEYKCKVSNKALPAPIEKTISKAK |
| | | GQPREPQVYTLPPSREEMTKNQVSLTCLVKGFYPSDIAVEWESNGQPENNYKT |
| | | TPPVLDSDGSFFLYSKLTVDKSRWQQGNVFSCSVMHEALHNHYTQKSLSLSPG |
| TIGIT-30-24 | 1756 | MKHLWFFLLLVAAPRWVLSEVQLVESGGGLVQAGGSLRLSCAASGNIFSRYIM |
| | | GWFRQAPGKEREWVAGISNGGTTKYADSVKGRFTISADNAKNTVYLQMNSLKP |
| | | EDTAVYYCAQGWKIIPTDWGQGTQVTVSSGGGGSEPKSSDKTHTCPPCPAPEL |
| | | LGGPSVFLFPPKPKDTLMISRTPEVTCVVVDVSHEDPEVKFNWYVDGVEVHNA |
| | | KTKPREEQYNSTYRVVSVLTVLHQDWLNGKEYKCKVSNKALPAPIEKTISKAK |
| | | GQPREPQVYTLPPSREEMTKNQVSLTCLVKGFYPSDIAVEWESNGQPENNYKT |
| | | TPPVLDSDGSFFLYSKLTVDKSRWQQGNVFSCSVMHEALHNHYTQKSLSLSPG |
| TIGIT-30-25 | 1757 | MKHLWFFLLLVAAPRWVLSEVQLVESGGGLVQAGGSLRLSCAASGPTFSIYDM |
| | | GWFRQAPGKEREFVASTIWSRGDTYYADSVKGRFTISADNAKNTVYLQMNSLK |
| | | PEDTAVYYCAAGVWSSLRHTAANWGQGTQVTVSSGGGGSEPKSSDKTHTCPPC |
| | | PAPELLGGPSVFLFPPKPKDTLMISRTPEVTCVVVDVSHEDPEVKFNWYVDGV |
| | | EVHNAKTKPREEQYNSTYRVVSVLTVLHQDWLNGKEYKCKVSNKALPAPIEKT |
| | | ISKAKGQPREPQVYTLPPSREEMTKNQVSLTCLVKGFYPSDIAVEWESNGQPE |
| | | NNYKTTPPVLDSDGSFFLYSKLTVDKSRWQQGNVFSCSVMHEALHNHYTQKSL |
| | | SLSPG |
| TIGIT-30-26 | 1758 | MKHLWFFLLLVAAPRWVLSEVQLVESGGGLVQAGGSLRLSCAASGRTYYAMGW |
| | | FRQAPGKEREFLAIITDGSKTLYADSVKGRFTISADNAKNTVYLQMNSLKPED |
| | | TAVYYCAAQFTLARHLVWGQGTQVTVSSGGGGSEPKSSDKTHTCPPCPAPELL |
| | | GGPSVFLFPPKPKDTLMISRTPEVTCVVVDVSHEDPEVKFNWYVDGVEVHNAK |
| | | TKPREEQYNSTYRVVSVLTVLHQDWLNGKEYKCKVSNKALPAPIEKTISKAKG |
| | | QPREPQVYTLPPSREEMTKNQVSLTCLVKGFYPSDIAVEWESNGQPENNYKTT |
| | | PPVLDSDGSFFLYSKLTVDKSRWQQGNVFSCSVMHEALHNHYTQKSLSLSPG |
| TIGIT-30-27 | 1759 | MKHLWFFLLLVAAPRWVLSEVQLVESGGGLVQAGGSLRLSCAASGFTFSTSWM |
| | | GWFRQAPGKEREFVAGILSDGRELYADSVKGRFTISADNAKNTVYLQMNSLKP |
| | | EDTAVYYCAADVWYGSTWRNWGQGTQVTVSSGGGGSEPKSSDKTHTCPPCPAP |
| | | ELLGGPSVFLFPPKPKDTLMISRTPEVTCVVVDVSHEDPEVKFNWYVDGVEVH |
| | | NAKTKPREEQYNSTYRVVSVLTVLHQDWLNGKEYKCKVSNKALPAPIEKTISK |
| | | AKGQPREPQVYTLPPSREEMTKNQVSLTCLVKGFYPSDIAVEWESNGQPENNY |
| | | KTTPPVLDSDGSFFLYSKLTVDKSRWQQGNVFSCSVMHEALHNHYTQKSLSLS |
| | | PG |
| TIGIT-30-28 | 1760 | MKHLWFFLLLVAAPRWVLSEVQLVESGGGLVQAGGSLRLSCAASGRTFESYRM |
| | | GWFRQAPGKEREFVGGINWSGRTYYADSVKGRFTISADNAKNTVYLQMNSLKP |
| | | EDTAVYYCAARRLYSGSYLDWGQGTQVTVSSGGGGSEPKSSDKTHTCPPCPAP |
| | | ELLGGPSVFLFPPKPKDTLMISRTPEVTCVVVDVSHEDPEVKFNWYVDGVEVH |
| | | NAKTKPREEQYNSTYRVVSVLTVLHQDWLNGKEYKCKVSNKALPAPIEKTISK |
| | | AKGQPREPQVYTLPPSREEMTKNQVSLTCLVKGFYPSDIAVEWESNGQPENNY |
| | | KTTPPVLDSDGSFFLYSKLTVDKSRWQQGNVFSCSVMHEALHNHYTQKSLSLS |
| | | PG |
| TIGIT-30-29 | 1761 | MKHLWFFLLLVAAPRWVLSEVQLVESGGGLVQAGGSLRLSCAASGSSLSFNAM |
| | | GWFRQAPGKEREWVSSVYIFGGSTYYADSVKGRFTISADNAKNTVYLQMNSLK |
| | | PEDTAVYYCANSNKPKFDWGQGTQVTVSSGGGGSEPKSSDKTHTCPPCPAPEL |
| | | LGGPSVFLFPPKPKDTLMISRTPEVTCVVVDVSHEDPEVKFNWYVDGVEVHNA |
| | | KTKPREEQYNSTYRVVSVLTVLHQDWLNGKEYKCKVSNKALPAPIEKTISKAK |
| | | GQPREPQVYTLPPSREEMTKNQVSLTCLVKGFYPSDIAVEWESNGQPENNYKT |
| | | TPPVLDSDGSFFLYSKLTVDKSRWQQGNVFSCSVMHEALHNHYTQKSLSLSPG |
| TIGIT-30-30 | 1762 | MKHLWFFLLLVAAPRWVLSEVQLVESGGGLVQAGGSLRLSCAASGGTFSGRGM |
| | | GWFRQAPGKEREWVSSVYIFGGSTYYADSVKGRFTISADNAKNTVYLQMNSLK |
| | | PEDTAVYYCANSNKPKFDWGQGTQVTVSSGGGGSEPKSSDKTHTCPPCPAPEL |
| | | LGGPSVFLFPPKPKDTLMISRTPEVTCVVVDVSHEDPEVKFNWYVDGVEVHNA |
| | | KTKPREEQYNSTYRVVSVLTVLHQDWLNGKEYKCKVSNKALPAPIEKTISKAK |
| | | GQPREPQVYTLPPSREEMTKNQVSLTCLVKGFYPSDIAVEWESNGQPENNYKT |
| | | TPPVLDSDGSFFLYSKLTVDKSRWQQGNVFSCSVMHEALHNHYTQKSLSLSPG |
| TIGIT-30-31 | 1763 | MKHLWFFLLLVAAPRWVLSEVQLVESGGGLVQAGGSLRLSCAASGPTFSWTMM |
| | | GWFRQAPGKEREFLAIITDGSKTLYADSVKGRFTISADNAKNTVYLQMNSLKP |
| | | EDTAVYYCAAQFTLARHLVWGQGTQVTVSSGGGGSEPKSSDKTHTCPPCPAPE |
| | | LLGGPSVFLFPPKPKDTLMISRTPEVTCVVVDVSHEDPEVKFNWYVDGVEVHN |
| | | AKTKPREEQYNSTYRVVSVLTVLHQDWLNGKEYKCKVSNKALPAPIEKTISKA |
| | | KGQPREPQVYTLPPSREEMTKNQVSLTCLVKGFYPSDIAVEWESNGQPENNYK |
| | | TTPPVLDSDGSFFLYSKLTVDKSRWQQGNVFSCSVMHEALHNHYTQKSLSLSP |
| | | G |
| TIGIT-30-32 | 1764 | MKHLWFFLLLVAAPRWVLSEVQLVESGGGLVQAGGSLRLSCAASGIIGTIRTM |
| | | GWFRQAPGKEREGISLITSDDGSTYYADSVKGRFTISADNAKNTVYLQMNSLK |
| | | PEDTAVYYCAWTTNRGMDWGQGTQVTVSSGGGGSEPKSSDKTHTCPPCPAPEL |
| | | LGGPSVFLFPPKPKDTLMISRTPEVTCVVVDVSHEDPEVKFNWYVDGVEVHNA |
| | | KTKPREEQYNSTYRVVSVLTVLHQDWLNGKEYKCKVSNKALPAPIEKTISKAK |
| | | GQPREPQVYTLPPSREEMTKNQVSLTCLVKGFYPSDIAVEWESNGQPENNYKT |
| | | TPPVLDSDGSFFLYSKLTVDKSRWQQGNVFSCSVMHEALHNHYTQKSLSLSPG |
| TIGIT-30-33 | 1765 | MKHLWFFLLLVAAPRWVLSEVQLVESGGGLVQAGGSLRLSCAASGFTLENNMM |
| | | GWFRQAPGKERELVSAIGWSGASTYYADSVKGRFTISADNAKNTVYLQMNSLK |
| | | PEDTAVYYCAANLRGDNWGQGTQVTVSSGGGGSEPKSSDKTHTCPPCPAPELL |
| | | GGPSVFLFPPKPKDTLMISRTPEVTCVVVDVSHEDPEVKFNWYVDGVEVHNAK |
| | | TKPREEQYNSTYRVVSVLTVLHQDWLNGKEYKCKVSNKALPAPIEKTISKAKG |
| | | QPREPQVYTLPPSREEMTKNQVSLTCLVKGFYPSDIAVEWESNGQPENNYKTT |
| | | PPVLDSDGSFFLYSKLTVDKSRWQQGNVFSCSVMHEALHNHYTQKSLSLSPG |
| TIGIT-30-34 | 1766 | MKHLWFFLLLVAAPRWVLSEVQLVESGGGLVQAGGSLRLSCAASGNIFSRYIM |
| | | GWFRQAPGKEREWVAGISSGGTTKYADSVKGRFTISADNAKNTVYLQMNSLKP |
| | | EDTAVYYCAQGWKIVPTNWGQGTQVTVSSGGGGSEPKSSDKTHTCPPCPAPEL |
| | | LGGPSVFLFPPKPKDTLMISRTPEVTCVVVDVSHEDPEVKFNWYVDGVEVHNA |
| | | KTKPREEQYNSTYRVVSVLTVLHQDWLNGKEYKCKVSNKALPAPIEKTISKAK |
| | | GQPREPQVYTLPPSREEMTKNQVSLTCLVKGFYPSDIAVEWESNGQPENNYKT |
| | | TPPVLDSDGSFFLYSKLTVDKSRWQQGNVFSCSVMHEALHNHYTQKSLSLSPG |
| TIGIT-30-35 | 1767 | MKHLWFFLLLVAAPRWVLSEVQLVESGGGLVQAGGSLRLSCAASGNIDRLYAM |
| | | GWFRQAPGKEREGISLITSDDGSTYYADSVKGRFTISADNAKNTVYLQMNSLK |
| | | PEDTAVYYCASSGPADARNGERWAWGQGTQVTVSSGGGGSEPKSSDKTHTCPP |
| | | CPAPELLGGPSVFLFPPKPKDTLMISRTPEVTCVVVDVSHEDPEVKFNWYVDG |
| | | VEVHNAKTKPREEQYNSTYRVVSVLTVLHQDWLNGKEYKCKVSNKALPAPIEK |
| | | TISKAKGQPREPQVYTLPPSREEMTKNQVSLTCLVKGFYPSDIAVEWESNGQP |
| | | ENNYKTTPPVLDSDGSFFLYSKLTVDKSRWQQGNVFSCSVMHEALHNHYTQKS |
| | | LSLSPG |
| TIGIT-30-36 | 1768 | MKHLWFFLLLVAAPRWVLSEVQLVESGGGLVQAGGSLRLSCAASGSIASIHAI |
| | | GWFRQAPGKEREWVSSVYIFGGSTYYADSVKGRFTISADNAKNTVYLQMNSLK |
| | | PEDTAVYYCANSNKPKFDWGQGTQVTVSSGGGGSEPKSSDKTHTCPPCPAPEL |
| | | LGGPSVFLFPPKPKDTLMISRTPEVTCVVVDVSHEDPEVKFNWYVDGVEVHNA |
| | | KTKPREEQYNSTYRVVSVLTVLHQDWLNGKEYKCKVSNKALPAPIEKTISKAK |
| | | GQPREPQVYTLPPSREEMTKNQVSLTCLVKGFYPSDIAVEWESNGQPENNYKT |
| | | TPPVLDSDGSFFLYSKLTVDKSRWQQGNVFSCSVMHEALHNHYTQKSLSLSPG |
| TIGIT-30-37 | 1769 | MKHLWFFLLLVAAPRWVLSEVQLVESGGGLVQAGGSLRLSCAASGRTFSSKAM |
| | | GWFRQAPGKEREWVSSVYIFGGSTYYADSVKGRFTISADNAKNTVYLQMNSLK |
| | | PEDTAVYYCANSNKPKFDWGQGTQVTVSSGGGGSEPKSSDKTHTCPPCPAPEL |
| | | LGGPSVFLFPPKPKDTLMISRTPEVTCVVVDVSHEDPEVKFNWYVDGVEVHNA |
| | | KTKPREEQYNSTYRVVSVLTVLHQDWLNGKEYKCKVSNKALPAPIEKTISKAK |
| | | GQPREPQVYTLPPSREEMTKNQVSLTCLVKGFYPSDIAVEWESNGQPENNYKT |
| | | TPPVLDSDGSFFLYSKLTVDKSRWQQGNVFSCSVMHEALHNHYTQKSLSLSPG |
| TIGIT-30-38 | 1770 | MKHLWFFLLLVAAPRWVLSEVQLVESGGGLVQAGGSLRLSCAASGSIASFNAM |
| | | GWFRQAPGKEREWVSSVYIFGGSTYYADSVKGRFTISADNAKNTVYLQMNSLK |
| | | PEDTAVYYCANSNKPKFDWGQGTQVTVSSGGGGSEPKSSDKTHTCPPCPAPEL |
| | | LGGPSVFLFPPKPKDTLMISRTPEVTCVVVDVSHEDPEVKFNWYVDGVEVHNA |
| | | KTKPREEQYNSTYRVVSVLTVLHQDWLNGKEYKCKVSNKALPAPIEKTISKAK |
| | | GQPREPQVYTLPPSREEMTKNQVSLTCLVKGFYPSDIAVEWESNGQPENNYKT |
| | | TPPVLDSDGSFFLYSKLTVDKSRWQQGNVFSCSVMHEALHNHYTQKSLSLSPG |
| TIGIT-30-39 | 1771 | MKHLWFFLLLVAAPRWVLSEVQLVESGGGLVQAGGSLRLSCAASGFTFSTSWM |
| | | GWFRQAPGKEREWVVGISSGGSTHYADSVKGRFTISADNAKNTVYLQMNSLKP |
| | | EDTAVYYCAADVWYGSTWRNWGQGTQVTVSSGGGGSEPKSSDKTHTCPPCPAP |
| | | ELLGGPSVFLFPPKPKDTLMISRTPEVTCVVVDVSHEDPEVKENWYVDGVEVH |
| | | NAKTKPREEQYNSTYRVVSVLTVLHQDWLNGKEYKCKVSNKALPAPIEKTISK |
| | | AKGQPREPQVYTLPPSREEMTKNQVSLTCLVKGFYPSDIAVEWESNGQPENNY |
| | | KTTPPVLDSDGSFFLYSKLTVDKSRWQQGNVFSCSVMHEALHNHYTQKSLSLS |
| | | PG |
| TIGIT-30-40 | 1772 | MKHLWFFLLLVAAPRWVLSEVQLVESGGGLVQAGGSLRLSCAASGFTFSGNWM |
| | | GWFRQAPGKEREWVVGISSGGSTHYADSVKGRFTISADNAKNTVYLQMNSLKP |
| | | EDTAVYYCAADVWYGSTWRNWGQGTQVTVSSGGGGSEPKSSDKTHTCPPCPAP |
| | | ELLGGPSVFLFPPKPKDTLMISRTPEVTCVVVDVSHEDPEVKFNWYVDGVEVH |
| | | NAKTKPREEQYNSTYRVVSVLTVLHQDWLNGKEYKCKVSNKALPAPIEKTISK |
| | | AKGQPREPQVYTLPPSREEMTKNQVSLTCLVKGFYPSDIAVEWESNGQPENNY |
| | | KTTPPVLDSDGSFFLYSKLTVDKSRWQQGNVFSCSVMHEALHNHYTQKSLSLS |
| | | PG |
| TIGIT-30-41 | 1773 | MKHLWFFLLLVAAPRWVLSEVQLVESGGGLVQAGGSLRLSCAASGRTFSSYAM |
| | | MGWFRQAPGKEREFLAIITDGSKTLYADSVKGRFTISADNAKNTVYLQMNSLK |
| | | PEDTAVYYCAAQFILARHLVWGQGTQVTVSSGGGGSEPKSSDKTHTCPPCPAP |
| | | ELLGGPSVFLFPPKPKDTLMISRTPEVTCVVVDVSHEDPEVKFNWYVDGVEVH |
| | | NAKTKPREEQYNSTYRVVSVLTVLHQDWLNGKEYKCKVSNKALPAPIEKTISK |
| | | AKGQPREPQVYTLPPSREEMTKNQVSLTCLVKGFYPSDIAVEWESNGQPENNY |
| | | KTTPPVLDSDGSFFLYSKLTVDKSRWQQGNVFSCSVMHEALHNHYTQKSLSLS |
| | | PG |
| TIGIT-30-42 | 1774 | MKHLWFFLLLVAAPRWVLSEVQLVESGGGLVQAGGSLRLSCAASGITITTEVM |
| | | GWFRQAPGKEREYVAAIHWNGDSTAYADSVKGRFTISADNAKNTVYLQMNSLK |
| | | PEDTAVYYCAQVSQWRAWGQGTQVTVSSGGGGSEPKSSDKTHTCPPCPAPELL |
| | | GGPSVFLFPPKPKDTLMISRTPEVTCVVVDVSHEDPEVKFNWYVDGVEVHNAK |
| | | TKPREEQYNSTYRVVSVLTVLHQDWLNGKEYKCKVSNKALPAPIEKTISKAKG |
| | | QPREPQVYTLPPSREEMTKNQVSLTCLVKGFYPSDIAVEWESNGQPENNYKTT |
| | | PPVLDSDGSFFLYSKLTVDKSRWQQGNVFSCSVMHEALHNHYTQKSLSLSPG |
| TIGIT-30-43 | 1775 | MKHLWFFLLLVAAPRWVLSEVQLVESGGGLVQAGGSLRLSCAASGFTFSTSWM |
| | | GWFRQAPGKERELVAARNSGGNTNYADSVKGRFTISADNAKNTVYLQMNSLKP |
| | | EDTAVYYCAADVWYGSTWRNWGQGTQVTVSSGGGGSEPKSSDKTHTCPPCPAP |
| | | ELLGGPSVFLFPPKPKDTLMISRTPEVTCVVVDVSHEDPEVKFNWYVDGVEVH |
| | | NAKTKPREEQYNSTYRVVSVLTVLHQDWLNGKEYKCKVSNKALPAPIEKTISK |
| | | AKGQPREPQVYTLPPSREEMTKNQVSLTCLVKGFYPSDIAVEWESNGQPENNY |
| | | KTTPPVLDSDGSFFLYSKLTVDKSRWQQGNVFSCSVMHEALHNHYTQKSLSLS |
| | | PG |
| TIGIT-30-44 | 1776 | MKHLWFFLLLVAAPRWVLSEVQLVESGGGLVQAGGSLRLSCAASGVTLDLYAM |
| | | GWFRQAPGKEREFVAGIWRSGGSTVYADSVKGRFTISADNAKNTVYLQMNSLK |
| | | PEDTAVYYCATWTTTWGRNRDWGQGTQVTVSSGGGGSEPKSSDKTHTCPPCPA |
| | | PELLGGPSVFLFPPKPKDTLMISRTPEVTCVVVDVSHEDPEVKFNWYVDGVEV |
| | | HNAKTKPREEQYNSTYRVVSVLTVLHQDWLNGKEYKCKVSNKALPAPIEKTIS |
| | | KAKGQPREPQVYTLPPSREEMTKNQVSLTCLVKGFYPSDIAVEWESNGQPENN |
| | | YKTTPPVLDSDGSFFLYSKLTVDKSRWQQGNVFSCSVMHEALHNHYTQKSLSL |
| | | SPG |
| TIGIT-30-45 | 1777 | MKHLWFFLLLVAAPRWVLSEVQLVESGGGLVQAGGSLRLSCAASGGTFSGGFM |
| | | GWFRQAPGKEREWVASVLRGGYTWYADSVKGRFTISADNAKNTVYLQMNSLKP |
| | | EDTAVYYCANGGSSYWGQGTQVTVSSGGGGSEPKSSDKTHTCPPCPAPELLGG |
| | | PSVFLFPPKPKDTLMISRTPEVTCVVVDVSHEDPEVKFNWYVDGVEVHNAKTK |
| | | PREEQYNSTYRVVSVLTVLHQDWLNGKEYKCKVSNKALPAPIEKTISKAKGQP |
| | | REPQVYTLPPSREEMTKNQVSLTCLVKGFYPSDIAVEWESNGQPENNYKTTPP |
| | | VLDSDGSFFLYSKLTVDKSRWQQGNVFSCSVMHEALHNHYTQKSLSLSPG |
| TIGIT-30-46 | 1778 | MKHLWFFLLLVAAPRWVLSEVQLVESGGGLVQAGGSLRLSCAASGRTESTYAS |
| | | MWWFRQAPGKEREFLAIITDGSKTLYADSVKGRFTISADNAKNTVYLQMNSLK |
| | | PEDTAVYYCAGSWSYPGLTWGQGTQVTVSSGGGGSEPKSSDKTHTCPPCPAPE |
| | | LLGGPSVFLFPPKPKDTLMISRTPEVTCVVVDVSHEDPEVKFNWYVDGVEVHN |
| | | AKTKPREEQYNSTYRVVSVLTVLHQDWLNGKEYKCKVSNKALPAPIEKTISKA |
| | | KGQPREPQVYTLPPSREEMTKNQVSLTCLVKGFYPSDIAVEWESNGQPENNYK |
| | | TTPPVLDSDGSFFLYSKLTVDKSRWQQGNVFSCSVMHEALHNHYTQKSLSLSP |
| | | G |
| TIGIT-30-47 | 1779 | MKHLWFFLLLVAAPRWVLSEVQLVESGGGLVQAGGSLRLSCAASGFTMSSSWM |
| | | GWFRQAPGKEREWVVGISSGGSTHYADSVKGRFTISADNAKNTVYLQMNSLKP |
| | | EDTAVYYCAADVWYGSTWRNWGQGTQVTVSSGGGGSEPKSSDKTHTCPPCPAP |
| | | ELLGGPSVFLFPPKPKDTLMISRTPEVTCVVVDVSHEDPEVKFNWYVDGVEVH |
| | | NAKTKPREEQYNSTYRVVSVLTVLHQDWLNGKEYKCKVSNKALPAPIEKTISK |
| | | AKGQPREPQVYTLPPSREEMTKNQVSLTCLVKGFYPSDIAVEWESNGQPENNY |
| | | KTTPPVLDSDGSFFLYSKLTVDKSRWQQGNVFSCSVMHEALHNHYTQKSLSLS |
| | | PG |
| TIGIT-30-48 | 1780 | MKHLWFFLLLVAAPRWVLSEVQLVESGGGLVQAGGSLRLSCAASGFPVNRYSM |
| | | GWFRQAPGKERELVSAIGWSGASTYYADSVKGRFTISADNAKNTVYLQMNSLK |
| | | PEDTAVYYCAADFWLARLRVADDYDWGQGTQVTVSSGGGGSEPKSSDKTHTCP |
| | | PCPAPELLGGPSVFLFPPKPKDTLMISRTPEVTCVVVDVSHEDPEVKFNWYVD |
| | | GVEVHNAKTKPREEQYNSTYRVVSVLTVLHQDWLNGKEYKCKVSNKALPAPIE |
| | | KTISKAKGQPREPQVYTLPPSREEMTKNQVSLTCLVKGFYPSDIAVEWESNGQ |
| | | PENNYKTTPPVLDSDGSFFLYSKLTVDKSRWQQGNVFSCSVMHEALHNHYTQK |
| | | SLSLSPG |
| TIGIT-30-49 | 1781 | MKHLWFFLLLVAAPRWVLSEVQLVESGGGLVQAGGSLRLSCAASGNIFSRYIM |
| | | GWFRQAPGKEREWVAGISNGGTTKYADSVKGRFTISADNAKNTVYLQMNSLKP |
| | | EDTAVYYCAQGWKIVPTNWGQGTQVTVSSGGGGSEPKSSDKTHTCPPCPAPEL |
| | | LGGPSVFLFPPKPKDTLMISRTPEVTCVVVDVSHEDPEVKFNWYVDGVEVHNA |
| | | KTKPREEQYNSTYRVVSVLTVLHQDWLNGKEYKCKVSNKALPAPIEKTISKAK |
| | | GQPREPQVYTLPPSREEMTKNQVSLTCLVKGFYPSDIAVEWESNGQPENNYKT |
| | | TPPVLDSDGSFFLYSKLTVDKSRWQQGNVFSCSVMHEALHNHYTQKSLSLSPG |
| TIGIT-30-50 | 1782 | MKHLWFFLLLVAAPRWVLSEVQLVESGGGLVQAGGSLRLSCAASGRSFSNYVM |
| | | GWFRQAPGKERERVATITSGGLTVYADSVKGRFTISADNAKNTVYLQMNSLKP |
| | | EDTAVYYCALYRVNWGQGTQVTVSSGGGGSEPKSSDKTHTCPPCPAPELLGGP |
| | | SVFLFPPKPKDTLMISRTPEVTCVVVDVSHEDPEVKFNWYVDGVEVHNAKTKP |
| | | REEQYNSTYRVVSVLTVLHQDWLNGKEYKCKVSNKALPAPIEKTISKAKGQPR |
| | | EPQVYTLPPSREEMTKNQVSLTCLVKGFYPSDIAVEWESNGQPENNYKTTPPV |
| | | LDSDGSFFLYSKLTVDKSRWQQGNVFSCSVMHEALHNHYTQKSLSLSPG |
| TIGIT-30-51 | 1783 | MKHLWFFLLLVAAPRWVLSEVQLVESGGGLVQAGGSLRLSCAASGSIFSISDM |
| | | GWFRQAPGKEREFVGAINWLSESTYYADSVKGRFTISADNAKNTVYLQMNSLK |
| | | PEDTAVYYCAAQGGVLSGWDWGQGTQVTVSSGGGGSEPKSSDKTHTCPPCPAP |
| | | ELLGGPSVFLFPPKPKDTLMISRTPEVTCVVVDVSHEDPEVKFNWYVDGVEVH |
| | | NAKTKPREEQYNSTYRVVSVLTVLHQDWLNGKEYKCKVSNKALPAPIEKTISK |
| | | AKGQPREPQVYTLPPSREEMTKNQVSLTCLVKGFYPSDIAVEWESNGQPENNY |
| | | KTTPPVLDSDGSFFLYSKLTVDKSRWQQGNVFSCSVMHEALHNHYTQKSLSLS |
| | | PG |
| TIGIT-30-52 | 1784 | MKHLWFFLLLVAAPRWVLSEVQLVESGGGLVQAGGSLRLSCAASGRTFSNYFM |
| | | GWFRQAPGKERESVATVTWRDNITYYADSVKGRFTISADNAKNTVYLQMNSLK |
| | | PEDTAVYYCASAGRWGQGTQVTVSSGGGGSEPKSSDKTHTCPPCPAPELLGGP |
| | | SVFLFPPKPKDTLMISRTPEVTCVVVDVSHEDPEVKFNWYVDGVEVHNAKTKP |
| | | REEQYNSTYRVVSVLTVLHQDWLNGKEYKCKVSNKALPAPIEKTISKAKGQPR |
| | | EPQVYTLPPSREEMTKNQVSLTCLVKGFYPSDIAVEWESNGQPENNYKTTPPV |
| | | LDSDGSFFLYSKLTVDKSRWQQGNVFSCSVMHEALHNHYTQKSLSLSPG |
| TIGIT-30-53 | 1785 | MKHLWFFLLLVAAPRWVLSEVQLVESGGGLVQAGGSLRLSCAASGLTFSNYVM |
| | | GWFRQAPGKERESVAAINWDSARTYYADSVKGRFTISADNAKNTVYLQMNSLK |
| | | PEDTAVYYCASAGRWGQGTQVTVSSGGGGSEPKSSDKTHTCPPCPAPELLGGP |
| | | SVFLFPPKPKDTLMISRTPEVTCVVVDVSHEDPEVKFNWYVDGVEVHNAKTKP |
| | | REEQYNSTYRVVSVLTVLHQDWLNGKEYKCKVSNKALPAPIEKTISKAKGQPR |
| | | EPQVYTLPPSREEMTKNQVSLTCLVKGFYPSDIAVEWESNGQPENNYKTTPPV |
| | | LDSDGSFFLYSKLTVDKSRWQQGNVFSCSVMHEALHNHYTQKSLSLSPG |
| TIGIT-30-54 | 1786 | MKHLWFFLLLVAAPRWVLSEVQLVESGGGLVQAGGSLRLSCAASGFTFRSFGM |
| | | GWFRQAPGKEREFVASTIWSRGDTYYADSVKGRFTISADNAKNTVYLQMNSLK |
| | | PEDTAVYYCASSPYGPLYRSTHYYDWGQGTQVTVSSGGGGSEPKSSDKTHTCP |
| | | PCPAPELLGGPSVFLFPPKPKDTLMISRTPEVTCVVVDVSHEDPEVKFNWYVD |
| | | GVEVHNAKTKPREEQYNSTYRVVSVLTVLHQDWLNGKEYKCKVSNKALPAPIE |
| | | KTISKAKGQPREPQVYTLPPSREEMTKNQVSLTCLVKGFYPSDIAVEWESNGQ |
| | | PENNYKTTPPVLDSDGSFFLYSKLTVDKSRWQQGNVFSCSVMHEALHNHYTQK |
| | | SLSLSPG |
| TIGIT-30-55 | 1787 | MKHLWFFLLLVAAPRWVLSEVQLVESGGGLVQAGGSLRLSCAASGNTFSGGFM |
| | | GWFRQAPGKEREWVASVLRGGYTWYADSVKGRFTISADNAKNTVYLQMNSLKP |
| | | EDTAVYYCATGWQSTTKSQGWGQGTQVTVSSGGGGSEPKSSDKTHTCPPCPAP |
| | | ELLGGPSVFLFPPKPKDTLMISRTPEVTCVVVDVSHEDPEVKFNWYVDGVEVH |
| | | NAKTKPREEQYNSTYRVVSVLTVLHQDWLNGKEYKCKVSNKALPAPIEKTISK |
| | | AKGQPREPQVYTLPPSREEMTKNQVSLTCLVKGFYPSDIAVEWESNGQPENNY |
| | | KTTPPVLDSDGSFFLYSKLTVDKSRWQQGNVFSCSVMHEALHNHYTQKSLSLS |
| | | PG |
| TIGIT-30-56 | 1788 | MKHLWFFLLLVAAPRWVLSEVQLVESGGGLVQAGGSLRLSCAASGLTISTYPM |
| | | GWFRQAPGKEREFVAAVNWSGRRELYADSVKGRFTISADNAKNTVYLQMNSLK |
| | | PEDTAVYYCAAFREYHWGQGTQVTVSSGGGGSEPKSSDKTHTCPPCPAPELLG |
| | | GPSVFLFPPKPKDTLMISRTPEVTCVVVDVSHEDPEVKFNWYVDGVEVHNAKT |
| | | KPREEQYNSTYRVVSVLTVLHQDWLNGKEYKCKVSNKALPAPIEKTISKAKGQ |
| | | PREPQVYTLPPSREEMTKNQVSLTCLVKGFYPSDIAVEWESNGQPENNYKTTP |
| | | PVLDSDGSFFLYSKLTVDKSRWQQGNVFSCSVMHEALHNHYTQKSLSLSPG |
| TIGIT-30-57 | 1789 | MKHLWFFLLLVAAPRWVLSEVQLVESGGGLVQAGGSLRLSCAASGPTFSIYDM |
| | | GWFRQAPGKEREFVAAITWNSGRIGYADSVKGRFTISADNAKNTVYLQMNSLK |
| | | PEDTAVYYCAAGVWSSLRHTAANWGQGTQVTVSSGGGGSEPKSSDKTHTCPPC |
| | | PAPELLGGPSVFLFPPKPKDTLMISRTPEVTCVVVDVSHEDPEVKFNWYVDGV |
| | | EVHNAKTKPREEQYNSTYRVVSVLTVLHQDWLNGKEYKCKVSNKALPAPIEKT |
| | | ISKAKGQPREPQVYTLPPSREEMTKNQVSLTCLVKGFYPSDIAVEWESNGQPE |
| | | NNYKTTPPVLDSDGSFFLYSKLTVDKSRWQQGNVFSCSVMHEALHNHYTQKSL |
| | | SLSPG |
| TIGIT-30-58 | 1790 | MKHLWFFLLLVAAPRWVLSEVQLVESGGGLVQAGGSLRLSCAASGFAFGDSWM |
| | | GWFRQAPGKEREWVSGISSGGGRTYYADSVKGRFTISADNAKNTVYLQMNSLK |
| | | PEDTAVYYCAADVWYGSTWRNWGQGTQVTVSSGGGGSEPKSSDKTHTCPPCPA |
| | | PELLGGPSVFLFPPKPKDTLMISRTPEVTCVVVDVSHEDPEVKFNWYVDGVEV |
| | | HNAKTKPREEQYNSTYRVVSVLTVLHQDWLNGKEYKCKVSNKALPAPIEKTIS |
| | | KAKGQPREPQVYTLPPSREEMTKNQVSLTCLVKGFYPSDIAVEWESNGQPENN |
| | | YKTTPPVLDSDGSFFLYSKLTVDKSRWQQGNVFSCSVMHEALHNHYTQKSLSL |
| | | SPG |
| TIGIT-31-01 | 1791 | MKHLWFFLLLVAAPRWVLSEVQLVESGGGLVQPGGSLRLSCAASGFTFDRSWM |
| | | GWFRQAPGKEREVVASITSGGSTYYADSVKGRFTISADNSKNTAYLQMNSLKP |
| | | EDTAVYYCAADVWYGSTWRNWGQGTLVTVSSGGGGSEPKSSDKTHTCPPCPAP |
| | | ELLGGPSVFLFPPKPKDTLMISRTPEVTCVVVDVSHEDPEVKFNWYVDGVEVH |
| | | NAKTKPREEQYNSTYRVVSVLTVLHQDWLNGKEYKCKVSNKALPAPIEKTISK |
| | | AKGQPREPQVYTLPPSREEMTKNQVSLTCLVKGFYPSDIAVEWESNGQPENNY |
| | | KTTPPVLDSDGSFFLYSKLTVDKSRWQQGNVFSCSVMHEALHNHYTQKSLSLS |
| | | PG |
| TIGIT-31-02 | 1792 | MKHLWFFLLLVAAPRWVLSEVQLVESGGGLVQPGGSLRLSCAASGRTFGDYIM |
| | | GWFRQAPGKERELVAEITRSGRTNYADSVKGRFTISADNSKNTAYLQMNSLKP |
| | | EDTAVYYCAAVFSRGPLTWGQGTLVTVSSGGGGSEPKSSDKTHTCPPCPAPEL |
| | | LGGPSVFLFPPKPKDTLMISRTPEVTCVVVDVSHEDPEVKFNWYVDGVEVHNA |
| | | KTKPREEQYNSTYRVVSVLTVLHQDWLNGKEYKCKVSNKALPAPIEKTISKAK |
| | | GQPREPQVYTLPPSREEMTKNQVSLTCLVKGFYPSDIAVEWESNGQPENNYKT |
| | | TPPVLDSDGSFFLYSKLTVDKSRWQQGNVFSCSVMHEALHNHYTQKSLSLSPG |
| TIGIT-31-03 | 1793 | MKHLWFFLLLVAAPRWVLSEVQLVESGGGLVQPGGSLRLSCAASGFTFSGNWM |
| | | GWFRQAPGKEREFVASISSSGISTYYADSVKGRFTISADNSKNTAYLQMNSLK |
| | | PEDTAVYYCAADVWYGSTWRNWGQGTLVTVSSGGGGSEPKSSDKTHTCPPCPA |
| | | PELLGGPSVFLFPPKPKDTLMISRTPEVTCVVVDVSHEDPEVKFNWYVDGVEV |
| | | HNAKTKPREEQYNSTYRVVSVLTVLHQDWLNGKEYKCKVSNKALPAPIEKTIS |
| | | KAKGQPREPQVYTLPPSREEMTKNQVSLTCLVKGFYPSDIAVEWESNGQPENN |
| | | YKTTPPVLDSDGSFFLYSKLTVDKSRWQQGNVFSCSVMHEALHNHYTQKSLSL |
| | | SPG |
| TIGIT-31-04 | 1794 | MKHLWFFLLLVAAPRWVLSEVQLVESGGGLVQPGGSLRLSCAASGFPVNRYWM |
| | | GWFRQAPGKERELVATITSGGSTNYADSVKGRFTISADNSKNTAYLQMNSLKP |
| | | EDTAVYYCAADVWYGSTWRNWGQGTLVTVSSGGGGSEPKSSDKTHTCPPCPAP |
| | | ELLGGPSVFLFPPKPKDTLMISRTPEVTCVVVDVSHEDPEVKFNWYVDGVEVH |
| | | NAKTKPREEQYNSTYRVVSVLTVLHQDWLNGKEYKCKVSNKALPAPIEKTISK |
| | | AKGQPREPQVYTLPPSREEMTKNQVSLTCLVKGFYPSDIAVEWESNGQPENNY |
| | | KTTPPVLDSDGSFFLYSKLTVDKSRWQQGNVFSCSVMHEALHNHYTQKSLSLS |
| | | PG |
| TIGIT-31-05 | 1795 | MKHLWFFLLLVAAPRWVLSEVQLVESGGGLVQPGGSLRLSCAASGRTFGDYIM |
| | | GWFRQAPGKEREFVATISRGGGSTYVDSVKGRFTISADNSKNTAYLQMNSLKP |
| | | EDTAVYYCAAVFSRGPLTWGQGTLVTVSSGGGGSEPKSSDKTHTCPPCPAPEL |
| | | LGGPSVFLFPPKPKDTLMISRTPEVTCVVVDVSHEDPEVKFNWYVDGVEVHNA |
| | | KTKPREEQYNSTYRVVSVLTVLHQDWLNGKEYKCKVSNKALPAPIEKTISKAK |
| | | GQPREPQVYTLPPSREEMTKNQVSLTCLVKGFYPSDIAVEWESNGQPENNYKT |
| | | TPPVLDSDGSFFLYSKLTVDKSRWQQGNVFSCSVMHEALHNHYTQKSLSLSPG |
| TIGIT-31-06 | 1796 | MKHLWFFLLLVAAPRWVLSEVQLVESGGGLVQPGGSLRLSCAASGFTFSTSWM |
| | | GWFRQAPGKERELVASITSGGSTYYADSVKGRFTISADNSKNTAYLQMNSLKP |
| | | EDTAVYYCAADVWYGSTWRNWGQGTLVTVSSGGGGSEPKSSDKTHTCPPCPAP |
| | | ELLGGPSVFLFPPKPKDTLMISRTPEVTCVVVDVSHEDPEVKFNWYVDGVEVH |
| | | NAKTKPREEQYNSTYRVVSVLTVLHQDWLNGKEYKCKVSNKALPAPIEKTISK |
| | | AKGQPREPQVYTLPPSREEMTKNQVSLTCLVKGFYPSDIAVEWESNGQPENNY |
| | | KTTPPVLDSDGSFFLYSKLTVDKSRWQQGNVFSCSVMHEALHNHYTQKSLSLS |
| | | PG |
| TIGIT-31-7 | 1797 | MKHLWFFLLLVAAPRWVLSEVQLVESGGGLVQPGGSLRLSCAASGSTFSINRM |
| | | GWFRQAPGKEREWVATIVHSGGHSGGTSYYADSVKGRFTISADNSKNTAYLQM |
| | | NSLKPEDTAVYYCAARPYTRPGSMWVSSLYDWGQGTLVTVSSGGGGSEPKSSD |
| | | KTHTCPPCPAPELLGGPSVFLFPPKPKDTLMISRTPEVTCVVVDVSHEDPEVK |
| | | FNWYVDGVEVHNAKTKPREEQYNSTYRVVSVLTVLHQDWLNGKEYKCKVSNKA |
| | | LPAPIEKTISKAKGQPREPQVYTLPPSREEMTKNQVSLTCLVKGFYPSDIAVE |
| | | WESNGQPENNYKTTPPVLDSDGSFFLYSKLTVDKSRWQQGNVFSCSVMHEALH |
| | | NHYTQKSLSLSPG |
| TIGIT-31-08 | 1798 | MKHLWFFLLLVAAPRWVLSEVQLVESGGGLVQPGGSLRLSCAASGFTFSTSWM |
| | | GWFRQAPGKERELVAARNSGGNTNYADSVKGRFTISADNSKNTAYLQMNSLKP |
| | | EDTAVYYCAADVWYGSTWRNWGQGTLVTVSSGGGGSEPKSSDKTHTCPPCPAP |
| | | ELLGGPSVFLFPPKPKDTLMISRTPEVTCVVVDVSHEDPEVKFNWYVDGVEVH |
| | | NAKTKPREEQYNSTYRVVSVLTVLHQDWLNGKEYKCKVSNKALPAPIEKTISK |
| | | AKGQPREPQVYTLPPSREEMTKNQVSLTCLVKGFYPSDIAVEWESNGQPENNY |
| | | KTTPPVLDSDGSFFLYSKLTVDKSRWQQGNVFSCSVMHEALHNHYTQKSLSLS |
| | | PG |
| TIGIT-31-9 | 1799 | MKHLWFFLLLVAAPRWVLSEVQLVESGGGLVQPGGSLRLSCAASGGTLSGNAM |
| | | GWFRQAPGKEREWVASIYWSSGNTYYADSVKGRFTISADNSKNTAYLQMNSLK |
| | | PEDTAVYYCANSNKPKFDWGQGTLVTVSSGGGGSEPKSSDKTHTCPPCPAPEL |
| | | LGGPSVFLFPPKPKDTLMISRTPEVTCVVVDVSHEDPEVKFNWYVDGVEVHNA |
| | | KTKPREEQYNSTYRVVSVLTVLHQDWLNGKEYKCKVSNKALPAPIEKTISKAK |
| | | GQPREPQVYTLPPSREEMTKNQVSLTCLVKGFYPSDIAVEWESNGQPENNYKT |
| | | TPPVLDSDGSFFLYSKLTVDKSRWQQGNVFSCSVMHEALHNHYTQKSLSLSPG |
| TIGIT-31-10 | 1800 | MKHLWFFLLLVAAPRWVLSEVQLVESGGGLVQPGGSLRLSCAASGHTFSSYGM |
| | | GWFRQAPGKERELVAAISWSGISTIYADSVKGRFTISADNSKNTAYLQMNSLK |
| | | PEDTAVYYCASSPYGPLYRSTHYYDWGQGTLVTVSSGGGGSEPKSSDKTHTCP |
| | | PCPAPELLGGPSVFLFPPKPKDTLMISRTPEVTCVVVDVSHEDPEVKFNWYVD |
| | | GVEVHNAKTKPREEQYNSTYRVVSVLTVLHQDWLNGKEYKCKVSNKALPAPIE |
| | | KTISKAKGQPREPQVYTLPPSREEMTKNQVSLTCLVKGFYPSDIAVEWESNGQ |
| | | PENNYKTTPPVLDSDGSFFLYSKLTVDKSRWQQGNVFSCSVMHEALHNHYTQK |
| | | SLSLSPG |
| TIGIT-31-11 | 1801 | MKHLWFFLLLVAAPRWVLSEVQLVESGGGLVQPGGSLRLSCAASGFTESTSWM |
| | | GWFRQAPGKEREFVASISTSGNTFYADSVKGRFTISADNSKNTAYLQMNSLKP |
| | | EDTAVYYCAADVWYGSTWRNWGQGTLVTVSSGGGGSEPKSSDKTHTCPPCPAP |
| | | ELLGGPSVFLFPPKPKDTLMISRTPEVTCVVVDVSHEDPEVKFNWYVDGVEVH |
| | | NAKTKPREEQYNSTYRVVSVLTVLHQDWLNGKEYKCKVSNKALPAPIEKTISK |
| | | AKGQPREPQVYTLPPSREEMTKNQVSLTCLVKGFYPSDIAVEWESNGQPENNY |
| | | KTTPPVLDSDGSFFLYSKLTVDKSRWQQGNVFSCSVMHEALHNHYTQKSLSLS |
| | | PG |
| TIGIT-31-12 | 1802 | MKHLWFFLLLVAAPRWVLSEVQLVESGGGLVQPGGSLRLSCAASGFTFSRYWM |
| | | GWFRQAPGKEREAVASITSGGSTYYADSVKGRFTISADNSKNTAYLQMNSLKP |
| | | EDTAVYYCAADVWYGSTWRNWGQGTLVTVSSGGGGSEPKSSDKTHTCPPCPAP |
| | | ELLGGPSVFLFPPKPKDTLMISRTPEVTCVVVDVSHEDPEVKFNWYVDGVEVH |
| | | NAKTKPREEQYNSTYRVVSVLTVLHQDWLNGKEYKCKVSNKALPAPIEKTISK |
| | | AKGQPREPQVYTLPPSREEMTKNQVSLTCLVKGFYPSDIAVEWESNGQPENNY |
| | | KTTPPVLDSDGSFFLYSKLTVDKSRWQQGNVFSCSVMHEALHNHYTQKSLSLS |
| | | PG |
| TIGIT-31-13 | 1803 | MKHLWFFLLLVAAPRWVLSEVQLVESGGGLVQPGGSLRLSCAASGFTFDRSWM |
| | | GWFRQAPGKEREWVASITSGGTTNYADSVKGRFTISADNSKNTAYLQMNSLKP |
| | | EDTAVYYCAADVWYGSTWRNWGQGTLVTVSSGGGGSEPKSSDKTHTCPPCPAP |
| | | ELLGGPSVFLFPPKPKDTLMISRTPEVTCVVVDVSHEDPEVKFNWYVDGVEVH |
| | | NAKTKPREEQYNSTYRVVSVLTVLHQDWLNGKEYKCKVSNKALPAPIEKTISK |
| | | AKGQPREPQVYTLPPSREEMTKNQVSLTCLVKGFYPSDIAVEWESNGQPENNY |
| | | KTTPPVLDSDGSFFLYSKLTVDKSRWQQGNVFSCSVMHEALHNHYTQKSLSLS |
| | | PG |
| TIGIT-31-14 | 1804 | MKHLWFFLLLVAAPRWVLSEVQLVESGGGLVQPGGSLRLSCAASGYTFRAYVM |
| | | GWFRQAPGKERELVAVINYRGSSLKYADSVKGRFTISADNSKNTAYLQMNSLK |
| | | PEDTAVYYCAASEWGGSDYDHDYDWGQGTLVTVSSGGGGSEPKSSDKTHTCPP |
| | | CPAPELLGGPSVFLFPPKPKDTLMISRTPEVTCVVVDVSHEDPEVKFNWYVDG |
| | | VEVHNAKTKPREEQYNSTYRVVSVLTVLHQDWLNGKEYKCKVSNKALPAPIEK |
| | | TISKAKGQPREPQVYTLPPSREEMTKNQVSLTCLVKGFYPSDIAVEWESNGQP |
| | | ENNYKTTPPVLDSDGSFFLYSKLTVDKSRWQQGNVFSCSVMHEALHNHYTQKS |
| | | LSLSPG |
| TIGIT-31-15 | 1805 | MKHLWFFLLLVAAPRWVLSEVQLVESGGGLVQPGGSLRLSCAASGFTFSTYGM |
| | | GWFRQAPGKEREFVAAISWSGVSKHYADSVKGRFTISADNSKNTAYLQMNSLK |
| | | PEDTAVYYCASSPYGPLYRSTHYYDWGQGTLVTVSSGGGGSEPKSSDKTHTCP |
| | | PCPAPELLGGPSVFLFPPKPKDTLMISRTPEVTCVVVDVSHEDPEVKFNWYVD |
| | | GVEVHNAKTKPREEQYNSTYRVVSVLTVLHQDWLNGKEYKCKVSNKALPAPIE |
| | | KTISKAKGQPREPQVYTLPPSREEMTKNQVSLTCLVKGFYPSDIAVEWESNGQ |
| | | PENNYKTTPPVLDSDGSFFLYSKLTVDKSRWQQGNVFSCSVMHEALHNHYTQK |
| | | SLSLSPG |
| TIGIT-31-16 | 1806 | MKHLWFFLLLVAAPRWVLSEVQLVESGGGLVQPGGSLRLSCAASGFTFSTSWM |
| | | GWFRQAPGKERELVVSVTSGGYTNYADSVKGRFTISADNSKNTAYLQMNSLKP |
| | | EDTAVYYCAADVWYGSTWRNWGQGTLVTVSSGGGGSEPKSSDKTHTCPPCPAP |
| | | ELLGGPSVFLFPPKPKDTLMISRTPEVTCVVVDVSHEDPEVKFNWYVDGVEVH |
| | | NAKTKPREEQYNSTYRVVSVLTVLHQDWLNGKEYKCKVSNKALPAPIEKTISK |
| | | AKGQPREPQVYTLPPSREEMTKNQVSLTCLVKGFYPSDIAVEWESNGQPENNY |
| | | KTTPPVLDSDGSFFLYSKLTVDKSRWQQGNVFSCSVMHEALHNHYTQKSLSLS |
| | | PG |
| TIGIT-31-17 | 1807 | MKHLWFFLLLVAAPRWVLSEVQLVESGGGLVQPGGSLRLSCAASGFTMSSSWM |
| | | GWFRQAPGKEREWVASINSGGTRNYADSVKGRFTISADNSKNTAYLQMNSLKP |
| | | EDTAVYYCAADVWYGSTWRNWGQGTLVTVSSGGGGSEPKSSDKTHTCPPCPAP |
| | | ELLGGPSVFLFPPKPKDTLMISRTPEVTCVVVDVSHEDPEVKFNWYVDGVEVH |
| | | NAKTKPREEQYNSTYRVVSVLTVLHQDWLNGKEYKCKVSNKALPAPIEKTISK |
| | | AKGQPREPQVYTLPPSREEMTKNQVSLTCLVKGFYPSDIAVEWESNGQPENNY |
| | | KTTPPVLDSDGSFFLYSKLTVDKSRWQQGNVFSCSVMHEALHNHYTQKSLSLS |
| | | PG |
| TIGIT-31-18 | 1808 | MKHLWFFLLLVAAPRWVLSEVQLVESGGGLVQPGGSLRLSCAASGFTFSGNWM |
| | | GWFRQAPGKEREFVASISSGSAINYADSVKGRFTISADNSKNTAYLQMNSLKP |
| | | EDTAVYYCAADVWYGSTWRNWGQGTLVTVSSGGGGSEPKSSDKTHTCPPCPAP |
| | | ELLGGPSVFLFPPKPKDTLMISRTPEVTCVVVDVSHEDPEVKFNWYVDGVEVH |
| | | NAKTKPREEQYNSTYRVVSVLTVLHQDWLNGKEYKCKVSNKALPAPIEKTISK |
| | | AKGQPREPQVYTLPPSREEMTKNQVSLTCLVKGFYPSDIAVEWESNGQPENNY |
| | | KTTPPVLDSDGSFFLYSKLTVDKSRWQQGNVFSCSVMHEALHNHYTQKSLSLS |
| | | PG |
| TIGIT-31-19 | 1809 | MKHLWFFLLLVAAPRWVLSEVQLVESGGGLVQPGGSLRLSCAASGRTFGNYAM |
| | | GWFRQAPGKEREFVADIRSSAGRTYYADSVKGRFTISADNSKNTAYLQMNSLK |
| | | PEDTAVYYCAASEWGGSDYDHDYDWGQGTLVTVSSGGGGSEPKSSDKTHTCPP |
| | | CPAPELLGGPSVFLFPPKPKDTLMISRTPEVTCVVVDVSHEDPEVKFNWYVDG |
| | | VEVHNAKTKPREEQYNSTYRVVSVLTVLHQDWLNGKEYKCKVSNKALPAPIEK |
| | | TISKAKGQPREPQVYTLPPSREEMTKNQVSLTCLVKGFYPSDIAVEWESNGQP |
| | | ENNYKTTPPVLDSDGSFFLYSKLTVDKSRWQQGNVFSCSVMHEALHNHYTQKS |
| | | LSLSPG |
| TIGIT-31-20 | 1810 | MKHLWFFLLLVAAPRWVLSEVQLVESGGGLVQPGGSLRLSCAASGFTFSGNWM |
| | | GWFRQAPGKEREFVAGILSDGRELYADSVKGRFTISADNSKNTAYLQMNSLKP |
| | | EDTAVYYCAADVWYGSTWRNWGQGTLVTVSSGGGGSEPKSSDKTHTCPPCPAP |
| | | ELLGGPSVFLFPPKPKDTLMISRTPEVTCVVVDVSHEDPEVKFNWYVDGVEVH |
| | | NAKTKPREEQYNSTYRVVSVLTVLHQDWLNGKEYKCKVSNKALPAPIEKTISK |
| | | AKGQPREPQVYTLPPSREEMTKNQVSLTCLVKGFYPSDIAVEWESNGQPENNY |
| | | KTTPPVLDSDGSFFLYSKLTVDKSRWQQGNVFSCSVMHEALHNHYTQKSLSLS |
| | | PG |
| TIGIT-31-21 | 1811 | MKHLWFFLLLVAAPRWVLSEVQLVESGGGLVQPGGSLRLSCAASGFTLSGNWM |
| | | GWFRQAPGKEREFVASISSSGISTYYADSVKGRFIISADNSKNTAYLQMNSLK |
| | | PEDTAVYYCAADVWYGSTWRNWGQGTLVTVSSGGGGSEPKSSDKTHTCPPCPA |
| | | PELLGGPSVFLFPPKPKDTLMISRTPEVTCVVVDVSHEDPEVKFNWYVDGVEV |
| | | HNAKTKPREEQYNSTYRVVSVLTVLHQDWLNGKEYKCKVSNKALPAPIEKTIS |
| | | KAKGQPREPQVYTLPPSREEMTKNQVSLTCLVKGFYPSDIAVEWESNGQPENN |
| | | YKTTPPVLDSDGSFFLYSKLTVDKSRWQQGNVFSCSVMHEALHNHYTQKSLSL |
| | | SPG |
| TIGIT-31-22 | 1812 | MKHLWFFLLLVAAPRWVLSEVQLVESGGGLVQPGGSLRLSCAASGRTFSTHAM |
| | | GWFRQAPGKEREFVAAITPINWGGRGTHYADSVKGRFTISADNSKNTAYLQMN |
| | | SLKPEDNAVYYCAAKRLRSGRWTWGQGTLVTVSSGGGGSEPKSSDKTHTCPPC |
| | | PAPELLGGPSVFLFPPKPKDTLMISRTPEVTCVVVDVSHEDPEVKFNWYVDGV |
| | | EVHNAKTKPREEQYNSTYRVVSVLTVLHQDWLNGKEYKCKVSNKALPAPIEKT |
| | | ISKAKGQPREPQVYTLPPSREEMTKNQVSLTCLVKGFYPSDIAVEWESNGQPE |
| | | NNYKTTPPVLDSDGSFFLYSKLTVDKSRWQQGNVFSCSVMHEALHNHYTQKSL |
| | | SLSPG |
| TIGIT-31-23 | 1813 | MKHLWFFLLLVAAPRWVLSEVQLVESGGGLVQPGGSLRLSCAASGFTFSNSGM |
| | | GWFRQAPGKEREWVASIYWSSGNTYYADSVKGRFTISADNSKNTAYLQMNSLK |
| | | PEDTAVYYCANSNKPKFDWGQGTLVTVSSGGGGSEPKSSDKTHTCPPCPAPEL |
| | | LGGPSVFLFPPKPKDTLMISRTPEVTCVVVDVSHEDPEVKENWYVDGVEVHNA |
| | | KTKPREEQYNSTYRVVSVLTVLHQDWLNGKEYKCKVSNKALPAPIEKTISKAK |
| | | GQPREPQVYTLPPSREEMTKNQVSLTCLVKGFYPSDIAVEWESNGQPENNYKT |
| | | TPPVLDSDGSFFLYSKLTVDKSRWQQGNVFSCSVMHEALHNHYTQKSLSLSPG |
| TIGIT-31-24 | 1814 | MKHLWFFLLLVAAPRWVLSEVQLVESGGGLVQPGGSLRLSCAASGRTFSMGWF |
| | | RQAPGKEREFVATVRWGTSSTYYADSVKGRFTISADNSKNTAYLQMNSLKPED |
| | | TAVYYCAAETFGSGSSLMSEYDWGQGTLVTVSSGGGGSEPKSSDKTHTCPPCP |
| | | APELLGGPSVFLFPPKPKDTLMISRTPEVTCVVVDVSHEDPEVKFNWYVDGVE |
| | | VHNAKTKPREEQYNSTYRVVSVLTVLHQDWLNGKEYKCKVSNKALPAPIEKTI |
| | | SKAKGQPREPQVYTLPPSREEMTKNQVSLTCLVKGFYPSDIAVEWESNGQPEN |
| | | NYKTTPPVLDSDGSFFLYSKLTVDKSRWQQGNVFSCSVMHEALHNHYTQKSLS |
| | | LSPG |
| TIGIT-31-25 | 1815 | MKHLWFFLLLVAAPRWVLSEVQLVESGGGLVQPGGSLRLSCAASGNIFSRYIM |
| | | GWFRQAPGKEREWVAGISNGGTTKYADSVKGRFTISADNSKNTAYLQMNSLKP |
| | | EDTAVYYCAQGWKIVPTNWGQGTLVTVSSGGGGSEPKSSDKTHTCPPCPAPEL |
| | | LGGPSVFLFPPKPKDTLMISRTPEVTCVVVDVSHEDPEVKFNWYVDGVEVHNA |
| | | KTKPREEQYNSTYRVVSVLTVLHQDWLNGKEYKCKVSNKALPAPIEKTISKAK |
| | | GQPREPQVYTLPPSREEMTKNQVSLTCLVKGFYPSDIAVEWESNGQPENNYKT |
| | | TPPVLDSDGSFFLYSKLTVDKSRWQQGNVFSCSVMHEALHNHYTQKSLSLSPG |
| TIGIT-31-26 | 1816 | MKHLWFFLLLVAAPRWVLSEVQLVESGGGLVQPGGSLRLSCAASGFTFDRSWM |
| | | GWFRQAPGKERELVAAITSGGSTYYADSVKGRFTISADNSKNTAYLQMNSLKP |
| | | EDTAVYYCAADVWYGSTWRNWGQGTLVTVSSGGGGSEPKSSDKTHTCPPCPAP |
| | | ELLGGPSVFLFPPKPKDTLMISRTPEVTCVVVDVSHEDPEVKFNWYVDGVEVH |
| | | NAKTKPREEQYNSTYRVVSVLTVLHQDWLNGKEYKCKVSNKALPAPIEKTISK |
| | | AKGQPREPQVYTLPPSREEMTKNQVSLTCLVKGFYPSDIAVEWESNGQPENNY |
| | | KTTPPVLDSDGSFFLYSKLTVDKSRWQQGNVFSCSVMHEALHNHYTQKSLSLS |
| | | PG |
| TIGIT-31-27 | 1817 | MKHLWFFLLLVAAPRWVLSEVQLVESGGGLVQPGGSLRLSCAASGFTFGHYAM |
| | | GWFRQAPGKEREFVAAISWSGVSTYYADSVKGRFTISADNSKNTAYLQMNSLK |
| | | PEDTAVYYCASSPYGPLYRSTHYYDWGQGTLVTVSSGGGGSEPKSSDKTHTCP |
| | | PCPAPELLGGPSVFLFPPKPKDTLMISRTPEVTCVVVDVSHEDPEVKFNWYVD |
| | | GVEVHNAKTKPREEQYNSTYRVVSVLTVLHQDWLNGKEYKCKVSNKALPAPIE |
| | | KTISKAKGQPREPQVYTLPPSREEMTKNQVSLTCLVKGFYPSDIAVEWESNGQ |
| | | PENNYKTTPPVLDSDGSFFLYSKLTVDKSRWQQGNVFSCSVMHEALHNHYTQK |
| | | SLSLSPG |
| TIGIT-31-28 | 1818 | MKHLWFFLLLVAAPRWVLSEVQLVESGGGLVQPGGSLRLSCAASGRTFSSYHM |
| | | GWFRQAPGKERELVALISRVGVTSYADSVKGRFTISADNSKNTAYLQMNSLKP |
| | | EDTAVYYCAAVRTYGSATYDWGQGTLVTVSSGGGGSEPKSSDKTHTCPPCPAP |
| | | ELLGGPSVFLFPPKPKDTLMISRTPEVTCVVVDVSHEDPEVKFNWYVDGVEVH |
| | | NAKTKPREEQYNSTYRVVSVLTVLHQDWLNGKEYKCKVSNKALPAPIEKTISK |
| | | AKGQPREPQVYTLPPSREEMTKNQVSLTCLVKGFYPSDIAVEWESNGQPENNY |
| | | KTTPPVLDSDGSFFLYSKLTVDKSRWQQGNVFSCSVMHEALHNHYTQKSLSLS |
| | | PG |
| TIGIT-31-29 | 1819 | MKHLWFFLLLVAAPRWVLSEVQLVESGGGLVQPGGSLRLSCAASGRSRMGWFR |
| | | QAPGKEREFVATISWSGSAVYADSVKGRFTISADNSKNTAYLQMNSLKPEDTA |
| | | VYYCAAGGRYSARVWGQGTLVTVSSGGGGSEPKSSDKTHTCPPCPAPELLGGP |
| | | SVFLFPPKPKDTLMISRTPEVTCVVVDVSHEDPEVKFNWYVDGVEVHNAKTKP |
| | | REEQYNSTYRVVSVLTVLHQDWLNGKEYKCKVSNKALPAPIEKTISKAKGQPR |
| | | EPQVYTLPPSREEMTKNQVSLTCLVKGFYPSDIAVEWESNGQPENNYKTTPPV |
| | | LDSDGSFFLYSKLTVDKSRWQQGNVFSCSVMHEALHNHYTQKSLSLSPG |
| TIGIT-31-30 | 1820 | MKHLWFFLLLVAAPRWVLSEVQLVESGGGLVQPGGSLRLSCAASGRTYNMGWF |
| | | RQAPGKEREWVATIYSRSGGSTTYYADSVKGRFTISADNSKNTAYLQMNSLKP |
| | | EDTAVYYCATYGYDSGRYYSWGQGTLVTVSSGGGGSEPKSSDKTHTCPPCPAP |
| | | ELLGGPSVFLFPPKPKDTLMISRTPEVTCVVVDVSHEDPEVKFNWYVDGVEVH |
| | | NAKTKPREEQYNSTYRVVSVLTVLHQDWLNGKEYKCKVSNKALPAPIEKTISK |
| | | AKGQPREPQVYTLPPSREEMTKNQVSLTCLVKGFYPSDIAVEWESNGQPENNY |
| | | KTTPPVLDSDGSFFLYSKLTVDKSRWQQGNVFSCSVMHEALHNHYTQKSLSLS |
| | | PG |
| TIGIT-31-31 | 1821 | MKHLWFFLLLVAAPRWVLSEVQLVESGGGLVQPGGSLRLSCAASGFTLSGNWM |
| | | GWFRQAPGKEREFVASISSGGGTNYADSVKGRFTISADNSKNTAYLQMNSLKP |
| | | EDTAVYYCAADVWYGSTWRNWGQGTLVTVSSGGGGSEPKSSDKTHTCPPCPAP |
| | | ELLGGPSVFLFPPKPKDTLMISRTPEVTCVVVDVSHEDPEVKFNWYVDGVEVH |
| | | NAKTKPREEQYNSTYRVVSVLTVLHQDWLNGKEYKCKVSNKALPAPIEKTISK |
| | | AKGQPREPQVYTLPPSREEMTKNQVSLTCLVKGFYPSDIAVEWESNGQPENNY |
| | | KTTPPVLDSDGSFFLYSKLTVDKSRWQQGNVFSCSVMHEALHNHYTQKSLSLS |
| | | PG |
| TIGIT-31-32 | 1822 | MKHLWFFLLLVAAPRWVLSEVQLVESGGGLVQPGGSLRLSCAASGFTFSTSWM |
| | | GWFRQAPGKERELVAAMTSGGGTNYADSVKGRFTISADNSKNTAYLQMNSLKP |
| | | EDTAVYYCAADVWYGSTWRNWGQGTLVTVSSGGGGSEPKSSDKTHTCPPCPAP |
| | | ELLGGPSVFLFPPKPKDTLMISRTPEVTCVVVDVSHEDPEVKFNWYVDGVEVH |
| | | NAKTKPREEQYNSTYRVVSVLTVLHQDWLNGKEYKCKVSNKALPAPIEKTISK |
| | | AKGQPREPQVYTLPPSREEMTKNQVSLTCLVKGFYPSDIAVEWESNGQPENNY |
| | | KTTPPVLDSDGSFFLYSKLTVDKSRWQQGNVFSCSVMHEALHNHYTQKSLSLS |
| | | PG |
| TIGIT-31-33 | 1823 | MKHLWFFLLLVAAPRWVLSEVQLVESGGGLVQPGGSLRLSCAASGFTFSTSWM |
| | | GWFRQAPGKERELVASITSGGSTNYADSVKGRFTISADNSKNTAYLQMNSLKP |
| | | EDTAVYYCAADVWYGSTWRNWGQGTLVTVSSGGGGSEPKSSDKTHTCPPCPAP |
| | | ELLGGPSVFLFPPKPKDTLMISRTPEVTCVVVDVSHEDPEVKFNWYVDGVEVH |
| | | NAKTKPREEQYNSTYRVVSVLTVLHQDWLNGKEYKCKVSNKALPAPIEKTISK |
| | | AKGQPREPQVYTLPPSREEMTKNQVSLTCLVKGFYPSDIAVEWESNGQPENNY |
| | | KTTPPVLDSDGSFFLYSKLTVDKSRWQQGNVFSCSVMHEALHNHYTQKSLSLS |
| | | PG |
| TIGIT-31-34 | 1824 | MKHLWFFLLLVAAPRWVLSEVQLVESGGGLVQPGGSLRLSCAASGRSRYGMGW |
| | | FRQAPGKEREFVSAISWSGISTYYADSVKGRFTISADNSKNTAYLQMNSLKPE |
| | | DTAVYYCAATQWGSSGWKQARWYDWGQGTLVTVSSGGGGSEPKSSDKTHTCPP |
| | | CPAPELLGGPSVFLFPPKPKDTLMISRTPEVTCVVVDVSHEDPEVKENWYVDG |
| | | VEVHNAKTKPREEQYNSTYRVVSVLTVLHQDWLNGKEYKCKVSNKALPAPIEK |
| | | TISKAKGQPREPQVYTLPPSREEMTKNQVSLTCLVKGFYPSDIAVEWESNGQP |
| | | ENNYKTTPPVLDSDGSFFLYSKLTVDKSRWQQGNVFSCSVMHEALHNHYTQKS |
| | | LSLSPG |
| TIGIT-31-35 | 1825 | MKHLWFFLLLVAAPRWVLSEVQLVESGGGLVQPGGSLRLSCAASGFTFSTSWM |
| | | GWFRQAPGKERELVASITSGGTTNYADSVKGRFTISADNSKNTAYLQMNSLKP |
| | | EDTAVYYCAADVWYGSTWRNWGQGTLVTVSSGGGGSEPKSSDKTHTCPPCPAP |
| | | ELLGGPSVFLFPPKPKDTLMISRTPEVTCVVVDVSHEDPEVKFNWYVDGVEVH |
| | | NAKTKPREEQYNSTYRVVSVLTVLHQDWLNGKEYKCKVSNKALPAPIEKTISK |
| | | AKGQPREPQVYTLPPSREEMTKNQVSLTCLVKGFYPSDIAVEWESNGQPENNY |
| | | KTTPPVLDSDGSFFLYSKLTVDKSRWQQGNVFSCSVMHEALHNHYTQKSLSLS |
| | | PG |
| TIGIT-31-36 | 1826 | MKHLWFFLLLVAAPRWVLSEVQLVESGGGLVQPGGSLRLSCAASGFTFDRSWM |
| | | GWFRQAPGKERELVASVTSGGTTNYADSVKGRFTISADNSKNTAYLQMNSLKP |
| | | EDTAVYYCAADVWYGSTWRNWGQGTLVTVSSGGGGSEPKSSDKTHTCPPCPAP |
| | | ELLGGPSVFLFPPKPKDTLMISRTPEVTCVVVDVSHEDPEVKFNWYVDGVEVH |
| | | NAKTKPREEQYNSTYRVVSVLTVLHQDWLNGKEYKCKVSNKALPAPIEKTISK |
| | | AKGQPREPQVYTLPPSREEMTKNQVSLTCLVKGFYPSDIAVEWESNGQPENNY |
| | | KTTPPVLDSDGSFFLYSKLTVDKSRWQQGNVFSCSVMHEALHNHYTQKSLSLS |
| | | PG |
| TIGIT-31-37 | 1827 | MKHLWFFLLLVAAPRWVLSEVQLVESGGGLVQPGGSLRLSCAASGSIFSINSM |
| | | GWFRQAPGKEREFVAALSWIIGSTYYADSVKGRFTISADNSKNTAYLQMNSLK |
| | | PEDTAVYYCAVNGRWRSWSSQRDWGQGTLVTVSSGGGGSEPKSSDKTHTCPPC |
| | | PAPELLGGPSVFLFPPKPKDTLMISRTPEVTCVVVDVSHEDPEVKFNWYVDGV |
| | | EVHNAKTKPREEQYNSTYRVVSVLTVLHQDWLNGKEYKCKVSNKALPAPIEKT |
| | | ISKAKGQPREPQVYTLPPSREEMTKNQVSLTCLVKGFYPSDIAVEWESNGQPE |
| | | NNYKTTPPVLDSDGSFFLYSKLTVDKSRWQQGNVFSCSVMHEALHNHYTQKSL |
| | | SLSPG |
| TIGIT-31-38 | 1828 | MKHLWFFLLLVAAPRWVLSEVQLVESGGGLVQPGGSLRLSCAASGFTFDRSWM |
| | | GWFRQAPGKERELVASITSGGSTSYADSVKGRFTISADNSKNTAYLQMNSLKP |
| | | EDTAVYYCAADVWYGSTWRNWGQGTLVTVSSGGGGSEPKSSDKTHTCPPCPAP |
| | | ELLGGPSVFLFPPKPKDTLMISRTPEVTCVVVDVSHEDPEVKFNWYVDGVEVH |
| | | NAKTKPREEQYNSTYRVVSVLTVLHQDWLNGKEYKCKVSNKALPAPIEKTISK |
| | | AKGQPREPQVYTLPPSREEMTKNQVSLTCLVKGFYPSDIAVEWESNGQPENNY |
| | | KTTPPVLDSDGSFFLYSKLTVDKSRWQQGNVFSCSVMHEALHNHYTQKSLSLS |
| | | PG |
| TIGIT-31-39 | 1829 | MKHLWFFLLLVAAPRWVLSEVQLVESGGGLVQPGGSLRLSCAASGFTFSTSWM |
| | | GWFRQAPGKERELVAGVNSNGYINYADSVKGRFTISADNSKNTAYLQMNSLKP |
| | | EDTAVYYCAADVWYGSTWRNWGQGTLVTVSSGGGGSEPKSSDKTHTCPPCPAP |
| | | ELLGGPSVFLFPPKPKDTLMISRTPEVTCVVVDVSHEDPEVKFNWYVDGVEVH |
| | | NAKTKPREEQYNSTYRVVSVLTVLHQDWLNGKEYKCKVSNKALPAPIEKTISK |
| | | AKGQPREPQVYTLPPSREEMTKNQVSLTCLVKGFYPSDIAVEWESNGQPENNY |
| | | KTTPPVLDSDGSFFLYSKLTVDKSRWQQGNVFSCSVMHEALHNHYTQKSLSLS |
| | | PG |
| TIGIT-31-40 | 1830 | MKHLWFFLLLVAAPRWVLSEVQLVESGGGLVQPGGSLRLSCAASGSTLRDYVM |
| | | GWFRQAPGKERELVSSISRSGTTMFADSVKGRFTIIADNSKNTAYLLMNSLKP |
| | | QDTAVYYCAAVFSRGLLTCGQGTLVTVSSGGGGSEPKSSDKTHTCPPCPAPEL |
| | | LGGPSVFLFPPKPKDTLMISRTPEVTCVVVDVSHEDPEVKFNWYVDGVEVHNA |
| | | KTKPREEQYNSTYRVVSVLTVLHQDWLNGKEYKCKVSNKALPAPIEKTISKAK |
| | | GQPREPQVYTLPPSREEMTKNQVSLTCLVKGFYPSDIAVEWESNGQPENNYKT |
| | | TPPVLDSDGSFFLYSKLTVDKSRWQQGNVFSCSVMHEALHNHYTQKSLSLSPG |
| TIGIT-31-41 | 1831 | MKHLWFFLLLVAAPRWVLSEVQLVESGGGLVQPGGSLRLSCAASGGTLSSYIM |
| | | GWFRQAPGKEREFVAAISGWSGGTTNYADSVKGRFTISADNSKNTAYLQMNSL |
| | | KPEDTAVYYCAAARFAPGSRGYDWGQGTLVTVSSGGGGSEPKSSDKTHTCPPC |
| | | PAPELLGGPSVFLFPPKPKDTLMISRTPEVTCVVVDVSHEDPEVKFNWYVDGV |
| | | EVHNAKTKPREEQYNSTYRVVSVLTVLHQDWLNGKEYKCKVSNKALPAPIEKT |
| | | ISKAKGQPREPQVYTLPPSREEMTKNQVSLTCLVKGFYPSDIAVEWESNGQPE |
| | | NNYKTTPPVLDSDGSFFLYSKLTVDKSRWQQGNVFSCSVMHEALHNHYTQKSL |
| | | SLSPG |
| TIGIT-31-42 | 1832 | MKHLWFFLLLVAAPRWVLSEVQLVESGGGLVQPGGSLRLSCAASGFTFSTHWM |
| | | GWFRQAPGKEREFVASIGSSGTTRYADSVKGRFTISADNSKNTAYLQMNSLKP |
| | | EDTAVYYCAADVWYGSTWRNWGQGTLVTVSSGGGGSEPKSSDKTHTCPPCPAP |
| | | ELLGGPSVFLFPPKPKDTLMISRTPEVTCVVVDVSHEDPEVKFNWYVDGVEVH |
| | | NAKTKPREEQYNSTYRVVSVLTVLHQDWLNGKEYKCKVSNKALPAPIEKTISK |
| | | AKGQPREPQVYTLPPSREEMTKNQVSLTCLVKGFYPSDIAVEWESNGQPENNY |
| | | KTTPPVLDSDGSFFLYSKLTVDKSRWQQGNVFSCSVMHEALHNHYTQKSLSLS |
| | | PG |
| TIGIT-31-43 | 1833 | MKHLWFFLLLVAAPRWVLSEVQLVESGGGLVQPGGSLRLSCAASGGTFSAFPM |
| | | GWFRQAPGKERELVAAISSGGTTYYADSVKGRFTISADNSKNTAYLQMNSLKP |
| | | EDTAVYYCAAQGGVLSAWDWGQGTLLTVSSGGGGSEPKSSDKTHTCPPCPAPE |
| | | LLGGPSVFLFPPKPKDTLMISRTPEVTCVVVDVSHEDPEVKFNWYVDGVEVHN |
| | | AKTKPREEQYNSTYRVVSVLTVLHQDWLNGKEYKCKVSNKALPAPIEKTISKA |
| | | KGQPREPQVYTLPPSREEMTKNQVSLTCLVKGFYPSDIAVEWESNGQPENNYK |
| | | TTPPVLDSDGSFFLYSKLTVDKSRWQQGNVFSCSVMHEALHNHYTQKSLSLSP |
| | | G |
| TIGIT-31-44 | 1834 | MKHLWFFLLLVAAPRWVLSEVQLVESGGGLVQPGGSLRLSCAASGFTFSGNWM |
| | | GWFRQAPGKEREWVASISSGGTTNYADSVKGRFTISADNSKNTAYLQMNSLKP |
| | | EDTAVYYCAADVWYGSTWRNWGQGTLVTVSSGGGGSEPKSSDKTHTCPPCPAP |
| | | ELLGGPSVFLFPPKPKDTLMISRTPEVTCVVVDVSHEDPEVKFNWYVDGVEVH |
| | | NAKTKPREEQYNSTYRVVSVLTVLHQDWLNGKEYKCKVSNKALPAPIEKTISK |
| | | AKGQPREPQVYTLPPSREEMTKNQVSLTCLVKGFYPSDIAVEWESNGQPENNY |
| | | KTTPPVLDSDGSFFLYSKLTVDKSRWQQGNVFSCSVMHEALHNHYTQKSLSLS |
| | | PG |
| TIGIT-31-45 | 1835 | MKHLWFFLLLVAAPRWVLSEVQLVESGGGLVQPGGSLRLSCAASGFTFSGNWM |
| | | GWFRQAPGKEREFVAGVNSNGYINYADSVKGRFTISADNSKNTAYLQMNSLKP |
| | | EDTAVYYCAADVWYGSTWRNWGQGTLVTVSSGGGGSEPKSSDKTHTCPPCPAP |
| | | ELLGGPSVFLFPPKPKDTLMISRTPEVTCVVVDVSHEDPEVKFNWYVDGVEVH |
| | | NAKTKPREEQYNSTYRVVSVLTVLHQDWLNGKEYKCKVSNKALPAPIEKTISK |
| | | AKGQPREPQVYTLPPSREEMTKNQVSLTCLVKGFYPSDIAVEWESNGQPENNY |
| | | KTTPPVLDSDGSFFLYSKLTVDKSRWQQGNVFSCSVMHEALHNHYTQKSLSLS |
| | | PG |
| TIGIT-31-46 | 1836 | MKHLWFFLLLVAAPRWVLSEVQLVESGGGLVQPGGSLRLSCAASGFTFDRSWM |
| | | GWFRQAPGKERELVASITSGGTTSYADSVKGRFTISADNSKNTAYLQMNSLKP |
| | | EDTAVYYCAADVWYGSTWRNWGQGTLVTVSSGGGGSEPKSSDKTHTCPPCPAP |
| | | ELLGGPSVFLFPPKPKDTLMISRTPEVTCVVVDVSHEDPEVKFNWYVDGVEVH |
| | | NAKTKPREEQYNSTYRVVSVLTVLHQDWLNGKEYKCKVSNKALPAPIEKTISK |
| | | AKGQPREPQVYTLPPSREEMTKNQVSLTCLVKGFYPSDIAVEWESNGQPENNY |
| | | KTTPPVLDSDGSFFLYSKLTVDKSRWQQGNVFSCSVMHEALHNHYTQKSLSLS |
| | | PG |
| TIGIT-31-47 | 1837 | MKHLWFFLLLVAAPRWVLSEVQLVESGGGLVQPGGSLRLSCAASGFTFSGNWM |
| | | GWFRQAPGKEREWVVGISSGGTPHYADSVKGRFTISADNSKNTAYLQMNSLKP |
| | | EDTAVYYCAADVWYGSTWRNWGQGTLVTVSSGGGGSEPKSSDKTHTCPPCPAP |
| | | ELLGGPSVFLFPPKPKDTLMISRTPEVTCVVVDVSHEDPEVKENWYVDGVEVH |
| | | NAKTKPREEQYNSTYRVVSVLTVLHQDWLNGKEYKCKVSNKALPAPIEKTISK |
| | | AKGQPREPQVYTLPPSREEMTKNQVSLTCLVKGFYPSDIAVEWESNGQPENNY |
| | | KTTPPVLDSDGSFFLYSKLTVDKSRWQQGNVFSCSVMHEALHNHYTQKSLSLS |
| | | PG |
| TIGIT-31-48 | 1838 | MKHLWFFLLLVAAPRWVLSEVQLVESGGGLVQPGGSLRLSCAASGFTLSSNWM |
| | | GWFRQAPGKERELVAGVNSNGYINYADSVKGRFTISADNSKNTAYLQMNSLKP |
| | | EDTAVYYCAADVWYGSTWRNWGQGTLVTVSSGGGGSEPKSSDKTHTCPPCPAP |
| | | ELLGGPSVFLFPPKPKDTLMISRTPEVTCVVVDVSHEDPEVKFNWYVDGVEVH |
| | | NAKTKPREEQYNSTYRVVSVLTVLHQDWLNGKEYKCKVSNKALPAPIEKTISK |
| | | AKGQPREPQVYTLPPSREEMTKNQVSLTCLVKGFYPSDIAVEWESNGQPENNY |
| | | KTTPPVLDSDGSFFLYSKLTVDKSRWQQGNVFSCSVMHEALHNHYTQKSLSLS |
| | | PG |
| TIGIT-31-49 | 1839 | MKHLWFFLLLVAAPRWVLSEVQLVESGGGLVQPGGSLRLSCAASGFDFSVSWM |
| | | GWFRQAPGKERELVARISSGGELPYYADSVKGRFTISADNSKNTAYLQMNSLK |
| | | PKHTAVYYCAARPNTRPGSMWGQGTLVTVSSGGGGSEPKSSDKTHTCPPCPAP |
| | | ELLGGPSVFLFPPKPKDTLMISRTPEVTCVVVDVSHEDPEVKFNWYVDGVEVH |
| | | NAKTKPREEQYNSTYRVVSVLTVLHQDWLNGKEYKCKVSNKALPAPIEKTISK |
| | | AKGQPREPQVYTLPPSREEMTKNQVSLTCLVKGFYPSDIAVEWESNGQPENNY |
| | | KTTPPVLDSDGSFFLYSKLTVDKSRWQQGNVFSCSVMHEALHNHYTQKSLSLS |
| | | PG |
| TIGIT-31-50 | 1840 | MKHLWFFLLLVAAPRWVLSEVQLVESGGGLVQPGGSLRLSCAASGFTMSSSWM |
| | | GWFRQAPGKEREFVGGISSGGSTYYADSVKGRFTISADNSKNTAYLQMNSLKP |
| | | EDTAVYYCAADVWYGSTWRNWGQGTLVTVSSGGGGSEPKSSDKTHTCPPCPAP |
| | | ELLGGPSVFLFPPKPKDTLMISRTPEVTCVVVDVSHEDPEVKFNWYVDGVEVH |
| | | NAKTKPREEQYNSTYRVVSVLTVLHQDWLNGKEYKCKVSNKALPAPIEKTISK |
| | | AKGQPREPQVYTLPPSREEMTKNQVSLTCLVKGFYPSDIAVEWESNGQPENNY |
| | | KTTPPVLDSDGSFFLYSKLTVDKSRWQQGNVFSCSVMHEALHNHYTQKSLSLS |
| | | PG |
| TIGIT-31-51 | 1841 | MKHLWFFLLLVAAPRWVLSEVQLVESGGGLVQPGGSLRLSCAASGRNFRRNSM |
| | | GWFRQAPGKEREFVAVITRSGGGEVTTYADSVKGRFTISADNSKNTAYLQMNS |
| | | LKPEDTAVYYCAMSSVTRGSSDWGQGTLVTVSSGGGGSEPKSSDKTHTCPPCP |
| | | APELLGGPSVFLFPPKPKDTLMISRTPEVTCVVVDVSHEDPEVKFNWYVDGVE |
| | | VHNAKTKPREEQYNSTYRVVSVLTVLHQDWLNGKEYKCKVSNKALPAPIEKTI |
| | | SKAKGQPREPQVYTLPPSREEMTKNQVSLTCLVKGFYPSDIAVEWESNGQPEN |
| | | NYKTTPPVLDSDGSFFLYSKLTVDKSRWQQGNVFSCSVMHEALHNHYTQKSLS |
| | | LSPG |
| TIGIT-31-52 | 1842 | MKHLWFFLLLVAAPRWVLSEVQLVESGGGLVQPGGSLRLSCAASGFTFDRSWM |
| | | GWFRQAPGKEREFVAGITSSGIPNYADSVKGRFTISADNSKNTAYLQMNSLKP |
| | | EDTAVYYCAADVWYGSTWRNWGQGTLVTVSSGGGGSEPKSSDKTHTCPPCPAP |
| | | ELLGGPSVFLFPPKPKDTLMISRTPEVTCVVVDVSHEDPEVKFNWYVDGVEVH |
| | | NAKTKPREEQYNSTYRVVSVLTVLHQDWLNGKEYKCKVSNKALPAPIEKTISK |
| | | AKGQPREPQVYTLPPSREEMTKNQVSLTCLVKGFYPSDIAVEWESNGQPENNY |
| | | KTTPPVLDSDGSFFLYSKLTVDKSRWQQGNVFSCSVMHEALHNHYTQKSLSLS |
| | | PG |
| TIGIT-31-53 | 1843 | MKHLWFFLLLVAAPRWVLSEVQLVESGGGLVQPGGSLRLSCAASGLTISTYNM |
| | | GWFRQAPGKERELVSAIGWSGASTYYADSVKGRFTISADNSKNTAYLQMNSLK |
| | | PEDTAVYYCAAFRGRMYDWGQGTLVTVSSGGGGSEPKSSDKTHTCPPCPAPEL |
| | | LGGPSVFLFPPKPKDTLMISRTPEVTCVVVDVSHEDPEVKFNWYVDGVEVHNA |
| | | KTKPREEQYNSTYRVVSVLTVLHQDWLNGKEYKCKVSNKALPAPIEKTISKAK |
| | | GQPREPQVYTLPPSREEMTKNQVSLTCLVKGFYPSDIAVEWESNGQPENNYKT |
| | | TPPVLDSDGSFFLYSKLTVDKSRWQQGNVFSCSVMHEALHNHYTQKSLSLSPG |
| TIGIT-31-54 | 1844 | MKHLWFFLLLVAAPRWVLSEVQLVESGGGLVQPGGSLRLSCAASGFTFSTSWM |
| | | GWFRQAPGKERELVAAVTSGGNTNYADSVKGRFTISADNSKNTAYLQMNSLKP |
| | | EDTAVYYCAADVWYGSTWRNWGQGTLVTVSSGGGGSEPKSSDKTHTCPPCPAP |
| | | ELLGGPSVFLFPPKPKDTLMISRTPEVTCVVVDVSHEDPEVKFNWYVDGVEVH |
| | | NAKTKPREEQYNSTYRVVSVLTVLHQDWLNGKEYKCKVSNKALPAPIEKTISK |
| | | AKGQPREPQVYTLPPSREEMTKNQVSLTCLVKGFYPSDIAVEWESNGQPENNY |
| | | KTTPPVLDSDGSFFLYSKLTVDKSRWQQGNVFSCSVMHEALHNHYTQKSLSLS |
| | | PG |
| TIGIT-31-55 | 1845 | MKHLWFFLLLVAAPRWVLSEVQLVESGGGLVQPGGSLRLSCAASGRTFGDYIM |
| | | GWFRQAPGKERELVAEITRVGNTNYADSVKGRFTISADNSKNTAYLQMNSLKP |
| | | EDTAVYYCAAVFSRGPLTWGQGTLVTVSSGGGGSEPKSSDKTHTCPPCPAPEL |
| | | LGGPSVFLFPPKPKDTLMISRTPEVTCVVVDVSHEDPEVKFNWYVDGVEVHNA |
| | | KTKPREEQYNSTYRVVSVLTVLHQDWLNGKEYKCKVSNKALPAPIEKTISKAK |
| | | GQPREPQVYTLPPSREEMTKNQVSLTCLVKGFYPSDIAVEWESNGQPENNYKT |
| | | TPPVLDSDGSFFLYSKLTVDKSRWQQGNVFSCSVMHEALHNHYTQKSLSLSPG |
| TIGIT-31-56 | 1846 | MKHLWFFLLLVAAPRWVLSEVQLVESGGGLVQPGGSLRLSCAASGRIFRRNSM |
| | | GWFRQAPGKEREFVAVITRSGGGEVTTYADSVKGRFTINADNSKNTAYLQMNS |
| | | LKPEDTAVYYCAMSSVTRGSSDWGQGTLVTVSTGGGGSEPKSSDKTHTCPPCP |
| | | APELLGGPSVFLFPPKPKDTLMISRTPEVTCVVVDVSHEDPEVKFNWYVDGVE |
| | | VHNAKTKPREEQYNSTYRVVSVLTVLHQDWLNGKEYKCKVSNKALPAPIEKTI |
| | | SKAKGQPREPQVYTLPPSREEMTKNQVSLTCLVKGFYPSDIAVEWESNGQPEN |
| | | NYKTTPPVLDSDGSFFLYSKLTVDKSRWQQGNVFSCSVMHEALHNHYTQKSLS |
| | | LSPG |

TABLE 17
Additional TIGIT Sequences

| | SEQ | | SEQ | | SEQ | |
|---|---|---|---|---|---|---|
| | ID | | ID | | ID | |
| Variant | NO | HCDR1 | NO | HCDR2 | NO | HCDR3 |
| TIGIT-PS4-1 | 2239 | GGFSLSG | 2288 | YPGGGY | 2337 | DQGLNYGSLFD |
| TIGIT-PS4-2 | 2240 | GGYTFTN | 2289 | YPSGGY | 2338 | DQGLNYGSLFD |
| TIGIT-PS4-3 | 2241 | GTSKVGV | 2290 | RNKGNKTY | 2339 | DTAAYFD |
| TIGIT-PS4-4 | 2242 | GGGFTIKD | 2291 | LPGSGS | 2340 | FAGGWGAYD |
| TIGIT-PS4-5 | 2243 | GDYTFTS | 2292 | RSKGFNFA | 2341 | FDYGNED |
| TIGIT-PS4-6 | 2244 | GGFSLTD | 2293 | YPSGGY | 2342 | GDAYSRYFD |
| TIGIT-PS4-7 | 2245 | GGFSLTD | 2294 | YPSGGY | 2343 | GDAYSRYFD |
| TIGIT-PS4-8 | 2246 | GGFSLTD | 2295 | YPSGGY | 2344 | GDAYSRYFD |
| TIGIT-PS4-9 | 2247 | GGYAISG | 2296 | TSGSGT | 2345 | GDYYGRKSA |
| TIGIT-PS4-10 | 2248 | GTSKVGV | 2297 | ATGGHT | 2346 | GNYDRAWFA |
| TIGIT-PS4-11 | 2249 | GGFTFTN | 2298 | LPGSGS | 2347 | GNYLPA |
| TIGIT-PS4-12 | 2250 | GGYTFTN | 2299 | NPGSGG | 2348 | GNYLPA |
| TIGIT-PS4-13 | 2251 | GTSGIGV | 2300 | KTVTGAV | 2349 | GNYPYFDV |
| TIGIT-PS4-14 | 2252 | GGYTFTK | 2301 | YPGTGS | 2350 | GVFGFFD |
| TIGIT-PS4-15 | 2253 | GGFTFTN | 2302 | TPGSSY | 2351 | GYGHLD |
| TIGIT-PS4-16 | 2254 | GGYTFTN | 2303 | KNIPNNYA | 2352 | LGYRSYFD |
| TIGIT-PS4-17 | 2255 | GGFSLTD | 2304 | SSGGSY | 2353 | NYYNLWTGYYPLAY |
| TIGIT-PS4-18 | 2256 | GDFNIKD | 2305 | KPLWGA | 2354 | SGGPYFFD |
| TIGIT-PS4-19 | 2257 | GTSGYYW | 2306 | STYSGY | 2355 | SGGPYFFD |
| TIGIT-PS4-20 | 2258 | GGYSFTG | 2307 | LPGSDN | 2356 | SVYYGGSYYFD |
| TIGIT-PS4-21 | 2259 | GTSGIGV | 2308 | LPGSDN | 2357 | WFGDLLSLKGVE |
| TIGIT-PS4-22 | 2260 | GTSGYYW | 2309 | LPGSDN | 2358 | WFGDLLSLKGVE |
| TIGIT-PS4-23 | 2261 | GGFTFLG | 2310 | ATGGHT | 2359 | WTYGSSFD |
| TIGIT-PS4-24 | 2262 | GGGPLRN | 2311 | YPGNRD | 2360 | GVFGFFD |
| TIGIT-PS4-25 | 2263 | GDFNIKD | 2312 | KPLWGA | 2361 | YDYYGGSYFD |
| TIGIT-PS4-26 | 2264 | GGYTFTS | 2313 | YPGGGY | 2362 | GNYDRAWFA |
| TIGIT-PS4-27 | 2265 | GGFSLTD | 2314 | SSYSGY | 2363 | SPYYYGNWD |
| TIGIT-PS4-28 | 2266 | GTTGEGV | 2315 | RNKPKGYT | 2364 | LYYYGTSYGVLD |
| TIGIT-PS4-29 | 2267 | GGYISTD | 2316 | STGGYN | 2365 | GDYVNWYFD |
| TIGIT-PS4-30 | 2268 | GGYNIKD | 2317 | KPLWGA | 2366 | GEDNFGSLSD |
| TIGIT-PS4-31 | 2269 | GGFSLTD | 2318 | YPSGGY | 2367 | GDAYSRYFY |
| TIGIT-PS4-32 | 2270 | GGYISTD | 2319 | STYSGY | 2368 | SGGPYFFD |
| TIGIT-PS4-33 | 2271 | GGYIFTE | 2320 | YPGSSY | 2369 | DQGLNYGSLFD |
| TIGIT-PS4-34 | 2272 | GDFNIKD | 2321 | KPLWGA | 2370 | GEDNFGSLSD |
| TIGIT-PS4-35 | 2273 | GGFSLTD | 2322 | YPGSGI | 2371 | GDAYSRYFD |
| TIGIT-PS4-36 | 2274 | GGFTFSR | 2323 | IPKYGT | 2372 | YSSSSPYAFDI |
| TIGIT-PS4-37 | 2275 | GFTFRNY | 2324 | SPSGNK | 2373 | GFGLGFDY |
| TIGIT-PS4-38 | 2276 | GLFFLTD | 2325 | YPSGGY | 2374 | GDAYSRYFD |
| TIGIT-PS4-39 | 2277 | GFTFGTI | 2326 | WGGGG | 2375 | AHGNPVSDLSFDY |
| TIGIT-PS4-40 | 2278 | GFTFSRY | 2327 | SPSGKK | 2376 | SSFDKYNFDY |
| TIGIT-PS4-41 | 2279 | GFTFSNY | 2328 | NPSRGY | 2377 | SYGGGFDY |
| TIGIT-PS4-42 | 2280 | GFTFTNY | 2329 | NPSRGY | 2378 | SYRGGFDY |
| TIGIT-PS4-43 | 2281 | GFTFSSY | 2330 | WGGGG | 2379 | GGTSFDY |
| TIGIT-PS4-44 | 2282 | GFTFSSY | 2331 | SPSGKK | 2380 | WSSRAFDY |
| TIGIT-PS4-45 | 2283 | GFTFSRY | 2332 | SPSGKK | 2381 | SSFDKYNFHY |
| TIGIT-PS4-46 | 2284 | GFTFDLY | 2333 | SPSGKK | 2382 | GWFGNFDY |
| TIGIT-PS4-47 | 2285 | GFTFSPY | 2334 | SCTSFT | 2383 | VRPFWGTFDY |
| TIGIT-PS4-48 | 2286 | GFTSNNF | 2335 | SPSGGW | 2384 | AFSTFDY |
| TIGIT-PS4-49 | 2287 | GFTFSRY | 2336 | SPSGKK | 2385 | SSFDKYNFDY |
| | SEQ | | SEQ | | SEQ | |
| | ID | | ID | | ID | |
| Variant | NO | LCDR1 | NO | LCDR2 | NO | LCDR3 |
| TIGIT-PS4-1 | 2385 | RASQRINTYLN | 2434 | LGSTRAS | 2483 | QNDYSNPLT |
| TIGIT-PS4-2 | 2386 | RAGQDISNYLN | 2435 | RANRLVS | 2484 | QQSYATLPT |
| TIGIT-PS4-3 | 2387 | QASQDISSYLN | 2436 | LVSKRDS | 2485 | QHFWGNPWT |
| TIGIT-PS4-4 | 2388 | KASQDIRKYLN | 2437 | YASNRYS | 2486 | QQGQTYPYT |
| TIGIT-PS4-5 | 2389 | SVSSSISSSNLH | 2438 | LGSTRAS | 2487 | QHSRELPWT |
| TIGIT-PS4-6 | 2390 | RASQSIGNDLH | 2439 | SASSLYS | 2488 | QNNYNYPLT |
| TIGIT-PS4-7 | 2391 | RASQSIGNDLH | 2440 | DATNLDS | 2489 | QNNYNYPLT |
| TIGIT-PS4-8 | 2392 | RASQSIGNDLH | 2441 | DATKLDS | 2490 | QNNYNYPLT |
| TIGIT-PS4-9 | 2393 | RASHSVSSSYLG | 2442 | YTSTLHS | 2491 | LQL |
| TIGIT-PS4-10 | 2394 | SASQDISNYLN | 2443 | YTTTLAA | 2492 | HQHYSTPFT |
| TIGIT-PS4-11 | 2395 | RASQSVHSRYFA | 2444 | TVSNRFS | 2493 | LQSDNLPYT |
| TIGIT-PS4-12 | 2396 | SVSSSISSSNLH | 2445 | STSNLAT | 2494 | GQTYNHPYT |
| TIGIT-PS4-13 | 2397 | RASQSVGGYLT | 2446 | AGSTLDS | 2495 | LQWSSFPYT |
| TIGIT-PS4-14 | 2398 | SASQGISNYLN | 2447 | YTNKLAT | 2496 | QQGNTLSYT |
| TIGIT-PS4-15 | 2399 | RSSHSIRSRRVA | 2448 | STSTLAS | 2497 | SQSTHVPPT |
| TIGIT-PS4-16 | 2400 | RASQDISIRLN | 2449 | YTDRLQT | 2498 | FQGSHSPWT |
| TIGIT-PS4-17 | 2401 | RASQSVSSGSLA | 2450 | SASSLYS | 2499 | GQSYNYPFT |
| TIGIT-PS4-18 | 2402 | RASQSVGRNLG | 2451 | YTSRLHT | 2500 | QQYDTLPLT |
| TIGIT-PS4-19 | 2403 | KASQNVGTAVA | 2452 | GTSNLAS | 2501 | QKTLRTWT |
| TIGIT-PS4-20 | 2404 | KATEDIYNRLA | 2453 | TVSNRFS | 2502 | QQGNTLPWT |
| TIGIT-PS4-21 | 2405 | RASQNIGTSIH | 2454 | YTNKLAT | 2503 | QQRSTYPPT |
| TIGIT-PS4-22 | 2406 | KASQNVRNNIA | 2455 | YTSTLES | 2504 | QQRSTYPPT |
| TIGIT-PS4-23 | 2407 | KASEDIHNRLA | 2456 | YTDRLQT | 2505 | HQYIQLHSFT |
| TIGIT-PS4-24 | 2408 | RASQDIYNYLN | 2457 | YTSSLRS | 2506 | HQWSSYPWT |
| TIGIT-PS4-25 | 2409 | QASQSISSYLA | 2458 | HGASNLQ | 2507 | QQGNTLPPT |
| TIGIT-PS4-26 | 2410 | RASSSVSSTYLH | 2459 | KVSNRFS | 2508 | QQGQTYPT |
| TIGIT-PS4-27 | 2411 | RASKTISKYLA | 2460 | YTSRLQT | 2509 | QQYRYSPRT |
| TIGIT-PS4-28 | 2412 | KASQDIRKYLN | 2461 | YASTLFT | 2510 | QQHQNVPLT |
| TIGIT-PS4-29 | 2413 | KASQNVRTSVA | 2462 | SASNRYS | 2511 | QQGGALPFT |
| TIGIT-PS4-30 | 2414 | RASQSVSSNYLA | 2463 | WAATRES | 2512 | GQSYSSPLT |
| TIGIT-PS4-31 | 2415 | RASQSISNDLH | 2464 | TASSLYS | 2513 | QNHYNYPLT |
| TIGIT-PS4-32 | 2416 | KASQDINKYIA | 2465 | YTSTLKS | 2514 | QQITDWPF |
| TIGIT-PS4-33 | 2417 | KASQDINKYIA | 2466 | WASTRHT | 2515 | QQHYGTPLT |
| TIGIT-PS4-34 | 2418 | KASEDIYSRLA | 2467 | WASTRHI | 2516 | QQGNRWPFT |
| TIGIT-PS4-35 | 2419 | RASQSIGNDLH | 2468 | TASNKGT | 2517 | QNNYNYPLT |
| TIGIT-PS4-36 | 2420 | RASQNVHPRYFA | 2469 | SASNRYS | 2518 | QQSNRWPLT |
| TIGIT-PS4-37 | 2421 | QGASLRNYYAS | 2470 | GQNIRPS | 2519 | SSCDRSGHGV |
| TIGIT-PS4-38 | 2422 | RASQSIGNDLH | 2471 | SASSLYS | 2520 | QNNYNYPLT |
| TIGIT-PS4-39 | 2423 | SGDKLGDKYTS | 2472 | HTSRLQD | 2521 | QQSYNLPLT |
| TIGIT-PS4-40 | 2424 | RASQDIGNFLN | 2473 | RTSWLQS | 2522 | QQRSSYPPT |
| TIGIT-PS4-41 | 2425 | RASQTIERRLN | 2474 | DASSLHT | 2523 | QQSYIIPPT |
| TIGIT-PS4-42 | 2426 | TASQTIERRLN | 2475 | DASSLHT | 2524 | QQSYIT |
| TIGIT-PS4-43 | 2427 | RASQNIRSYLN | 2476 | GKNIRPS | 2525 | QQYASVPVT |
| TIGIT-PS4-44 | 2428 | RASQSISSYLH | 2477 | RTSWLQS | 2526 | QQYSGYPIT |
| TIGIT-PS4-45 | 2429 | SASQDINKYLN | 2478 | HTSRLQS | 2527 | QQIAYFPST |
| TIGIT-PS4-46 | 2430 | RASQGVRTSLA | 2479 | GKNIRPS | 2528 | QQSYENPLT |
| TIGIT-PS4-47 | 2431 | RASHDVSCGVS | 2480 | KKRPI | 2529 | QDSYYNGSGWCYA |
| TIGIT-PS4-48 | 2432 | RATQSIRSFLN | 2481 | KVSNRFS | 2530 | QAWESSTVV |
| TIGIT-PS4-49 | 2433 | SASQDINKYLN | 2482 | HTSRLQS | 2531 | QQFAYFPAT |

| | SEQ | |
|---|---|---|
| | ID | Combination |
| Variant | NO | CDR |
| TIGIT-PS4-1 | 2532 | GGFSLSGYPGGGYDQGLNYGSLFDRASQRINTYLNLGSTRASQNDYSNPLT |
| TIGIT-PS4-2 | 2533 | GGYTFTNYPSGGYDQGLNYGSLFDRAGQDISNYLNRANRLVSQQSYATLPT |
| TIGIT-PS4-3 | 2534 | GTSKVGVRNKGNKTYDTAAYFDQASQDISSYLNLVSKRDSQHFWGNPWT |
| TIGIT-PS4-4 | 2535 | GGGFTIKDLPGSGSFAGGWGAYDKASQDIRKYLNYASNRYSQQGQTYPYT |
| TIGIT-PS4-5 | 2536 | GDYTFTSRSKGFNFAFDYGNEDSVSSSISSSNLHLGSTRASQHSRELPWT |
| TIGIT-PS4-6 | 2537 | GGFSLTDYPSGGYGDAYSRYFDRASQSIGNDLHSASSLYSQNNYNYPLT |
| TIGIT-PS4-7 | 2538 | GGFSLTDYPSGGYGDAYSRYFDRASQSIGNDLHDATNLDSQNNYNYPLT |
| TIGIT-PS4-8 | 2539 | GGFSLTDYPSGGYGDAYSRYFDRASQSIGNDLHDATKLDSQNNYNYPLT |
| TIGIT-PS4-9 | 2540 | GGYAISGTSGSGTGDYYGRKSARASHSVSSSYLGYTSTLHSLQL |
| TIGIT-PS4-10 | 2541 | GTSKVGVATGGHTGNYDRAWFASASQDISNYLNYTTTLAAHQHYSTPFT |
| TIGIT-PS4-11 | 2542 | GGFTFTNLPGSGSGNYLPARASQSVHSRYFATVSNRFSLQSDNLPYT |
| TIGIT-PS4-12 | 2543 | GGYTFTNNPGSGGGNYLPASVSSSISSSNLHSTSNLATGQTYNHPYT |
| TIGIT-PS4-13 | 2544 | GTSGIGVKTVTGAVGNYPYFDVRASQSVGGYLTAGSTLDSLQWSSFPYT |
| TIGIT-PS4-14 | 2545 | GGYTFTKYPGTGSGVFGFFDSASQGISNYLNYTNKLATQQGNTLSYT |
| TIGIT-PS4-15 | 2546 | GGFTFTNTPGSSYGYGHLDRSSHSIRSRRVASTSTLASSQSTHVPPT |
| TIGIT-PS4-16 | 2547 | GGYTFTNKNIPNNYALGYRSYFDRASQDISIRLNYTDRLQTFQGSHSPWT |
| TIGIT-PS4-17 | 2548 | GGFSLTDSSGGSYNYYNLWTGYYPLAYRASQSVSSGSLASASSLYSGQSYNYPFT |
| TIGIT-PS4-18 | 2549 | GDFNIKDKPLWGASGGPYFFDRASQSVGRNLGYTSRLHTQQYDTLPLT |
| TIGIT-PS4-19 | 2550 | GTSGYYWSTYSGYSGGPYFFDKASQNVGTAVAGTSNLASQKTLRTWT |
| TIGIT-PS4-20 | 2551 | GGYSFTGLPGSDNSVYYGGSYYFDKATEDIYNRLATVSNRFSQQGNTLPWT |
| TIGIT-PS4-21 | 2552 | GTSGIGVLPGSDNWFGDLLSLKGVERASQNIGTSIHYTNKLATQQRSTYPPT |
| TIGIT-PS4-22 | 2553 | GTSGYYWLPGSDNWFGDLLSLKGVEKASQNVRNNIAYTSTLESQQRSTYPPT |
| TIGIT-PS4-23 | 2554 | GGFTFLGATGGHTWTYGSSFDKASEDIHNRLAYTDRLQTHQYIQLHSFT |

TABLE 18
Additional TIGIT Sequences

| Variant | SEQ ID NO | VHH Sequences | | | | |
|---|---|---|---|---|---|---|
| TIGIT-T1 | 2555 | EVQLVESGGGLVQPGGSLRLSCAASGPIFRRNSMGWFRQAPGKEREFVAVI | | | | |
| | | TRSAGGEVTTYADSVKGRFTINADNSKNTAYLQMNSLKPEDTAVYYCAMS | | | | |
| | | SVPRGSSDWGQGTLVTVSS | | | | |
| TIGIT-T2 | 2556 | EVQLVESGGGLVQPGGSLRLSCAASGRIFRRNSMGWFRQAPGKEREFVAVI | | | | |
| | | TRSGGGEKTTYADSVKGRFTINADNSKNTAYLQMNSLKPEDTAVYYCAMS | | | | |
| | | SVTRGSSDWGQGTLVTVSS | | | | |
| TIGIT-T3 | 2557 | EVQLVESGGGLVQPGGSLRLSCAASRRIFRRRSMGWFRQAPGKEREFVAVI | | | | |
| | | TRSGGGEVTTYADSVKGRFTINADNSKNTAYLQMNSLKPEDTAVYYCAMS | | | | |
| | | SVTRGSSDWGQGTLVTVSS | | | | |
| TIGIT-T4 | 2558 | EVQLVESGGGLVQPGGSLRLSCAASGRIFRRNSMGWFRQAPGKEREFVAVI | | | | |
| | | TRSGGGEVTTYADSVKGRFTINADNSKNTAYLQMNSLKPEDTAVYYCAMS | | | | |
| | | SVPRGSSDWGQGTLVTVSS | | | | |
| TIGIT-T5 | 2559 | EVQLVESGGGLVQPGGSLRLSCAASGRIFRRNSMGWFRQAPGKEREFVAVI | | | | |
| | | TRSGGGEVTTYADSVKGRFTINADNSKNTAYLQMNSLKPEDTAVYYCAMS | | | | |
| | | SVTRGSVDWGQGTLVTVSS | | | | |
| TIGIT-T6 | 2560 | EVQLVESGGGLVQPGGSLRLSCAASGRIFRRNSMGWFRQAPGKEREFVAVI | | | | |
| | | TRAGGGEVTTYADSVKGRFTINADNSKNTAYLQMNSLKPEDTAVYYCAMS | | | | |
| | | SVTRGSSDWGQGTLVTVSS | | | | |
| TIGIT-T7 | 2561 | EVQLVESGGGLVQPGGSLRLSCAASGRIFRRNSMGWFRQAPGKEREFVAVI | | | | |
| | | TRSGGGEVTTYADSVKGRFTINADNSKNTAYLQMNSLKPEDTAVYYCAMS | | | | |
| | | SITRGSSDWGQGTLVTVSS | | | | |
| TIGIT-T8 | 2562 | EVQLVESGGGLVQPGGSLRLSCAASGRIFRRNSMGWFRQAPGKEREFVAVI | | | | |
| | | TRSGGGEVTTYADSVKGRFTINADNSKNTAYLQMNSLKPEDTAVYYCAMS | | | | |
| | | SETRGSSDWGQGTLVTVSS | | | | |
| TIGIT-T9 | 2563 | EVQLVESGGGLVQPGGSLRLSCAASGHIFRRNSMGWFRQAPGKEREFVAVI | | | | |
| | | TRSGGGEVTTYADSVKGRFTINADNSKNTAYLQMNSLKPEDTAVYYCAMS | | | | |
| | | SVTRGSSDWGQGTLVTVSS | | | | |
| TIGIT-T10 | 2564 | EVQLVESGGGLVQPGGSLRLSCAASGRIFRRNSMGWFRQAPGKEREFVAVI | | | | |
| | | TRSGGGEVTTYADSVKGRFTINADNSKNTAYLQMNSLKPEDTAVYYCAMS | | | | |
| | | SVVRGSSHWGQGTLVTVSS | | | | |
| TIGIT-T11 | 2565 | EVQLVESGGGLVQPGGSLRLSCAASGRTFRRNSMGWFRQAPGKEREFVAVI | | | | |
| | | TRSGGGAVTTYADSVKGRFTINADNSKNTAYLQMNSLKPEDTAVYYCAMS | | | | |
| | | SVTRGSSDWGQGTLVTVSS | | | | |
| TIGIT-T12 | 2566 | EVQLVESGGGLVQPGGSLRLSCAASGRIFHRNSMGWFRQAPGKEREFVAVI | | | | |
| | | TRSGVGEVTTYADSVKGRFTINADNSKNTAYLQMNSLKPEDTAVYYCAMS | | | | |
| | | SVTRGSSDWGQGTLVTVSS | | | | |
| TIGIT-T13 | 2567 | EVQLVESGGGLVQPGGSLRLSCAASGRIFRRNSMGWFRQAPGKEREFVAVI | | | | |
| | | TRSGGGEVTTYADSVKGRFTINADNSKNTAYLQMNSLKPEDTAVYYCAMS | | | | |
| | | GVTRGSSDWGQGTLVTVSS | | | | |
| TIGIT-T14 | 2568 | EVQLVESGGGLVQPGGSLRLSCAASGRIFERNSMGWFRQAPGKEREFVAVI | | | | |
| | | TKSGGGEVTTYADSVKGRFTINADNSKNTAYLQMNSLKPEDTAVYYCAMS | | | | |
| | | SVTRGSSQWGQGTLVTVSS | | | | |
| TIGIT-T15 | 2569 | EVQLVESGGGLVQPGGSLRLSCAASGRIFRRNSMGWFRQAPGKEREFVAVI | | | | |
| | | THSGGGEVTTYADSVKGRFTINADNSKNTAYLQMNSLKPEDTAVYYCAMS | | | | |
| | | SVNRGSSDWGQGTLVTVSS | | | | |
| TIGIT-T16 | 2570 | EVQLVESGGGLVQPGGSLRLSCAASGGIFRRNSMGWFRQAPGKEREFVAVI | | | | |
| | | TRSGGGSVTTYADSVKGRFTINADNSKNTAYLQMNSLKPEDTAVYYCAMS | | | | |
| | | SVTRGSSDWGQGTLVTVSS | | | | |
| TIGIT-T17 | 2571 | EVQLVESGGGLVQPGGSLRLSCAASGTIFRRNSMGWFRQAPGKEREFVAVI | | | | |
| | | TRSGSGEVTTYADSVKGRFTINADNSKNTAYLQMNSLKPEDTAVYYCAMS | | | | |
| | | SVTPGSSDWGQGTLVTVSS | | | | |
| TIGIT-T18 | 2572 | EVQLVESGGGLVQPGGSLRLSCAASGPIFRRNSMGWFRQAPGKEREFVAVT | | | | |
| | | TRSGGGEVTTYADSVKGRFTINADNSKNTAYLQMNSLKPEDTAVYYCAMS | | | | |
| | | SVTRGISDWGQGTLVTVSS | | | | |
| TIGIT-T19 | 2573 | EVQLVESGGGLVQPGGSLRLSCAASGRIFRRNSMGWFRQAPGKEREFVAVI | | | | |
| | | TRSGCGEVTTYADSVKGRFTINADNSKNTAYLQMNSLKPEDTAVYYCAMS | | | | |
| | | SVTRGSPDWGQGTLVTVSS | | | | |
| TIGIT-T20 | 2574 | EVQLVESGGGLVQPGGSLRLSCAASGSIFRRNSMGWFRQAPGKEREFVAVI | | | | |
| | | TRSGGGEVTTYADSVKGRFTINADNSKNTAYLQMNSLKPEDTAVYYCAMS | | | | |
| | | SVERGSADWGQGTLVTVSS | | | | |
| TIGIT-T21 | 2575 | EVQLVESGGGLVQPGGSLRLSCAASGRIFRRNSMGWFRQAPGKEREFVAV | | | | |
| | | NTRSGTGEVTTYADSVKGRFTINADNSKNTAYLQMNSLKPEDTAVYYCAM | | | | |
| | | SSVTRGSSDWGQGTLVTVSS | | | | |
| TIGIT-T22 | 2576 | EVQLVESGGGLVQPGGSLRLSCAASGRIFRRNSMGWFRQAPGKEREFVAVI | | | | |
| | | TRAGGGEVTTYADSVKGRFTINADNSKNTAYLQMNSLKPEDTAVYYCAMS | | | | |
| | | SLTRGSSDWGQGTLVTVSS | | | | |
| TIGIT-T23 | 2577 | EVQLVESGGGLVQPGGSLRLSCAASGRIFRRNSMGWFRQAPGKEREFVAVL | | | | |
| | | TRSGGGEVTTYADSVKGRFTINADNSKNTAYLQMNSLKPEDTAVYYCGMS | | | | |
| | | SVTRGSSDWGQGTLVTVSS | | | | |
| TIGIT-T24 | 2578 | EVQLVESGGGLVQPGGSLRLSCAASGRIFHRNSMGWFRQAPGKEREFVAVI | | | | |
| | | TRSGGGEVTTYADSVKGRFTINADNSKNTAYLQMNSLKPEDTAVYYCAMS | | | | |
| | | SLTRGSSDWGQGTLVTVSS | | | | |
| TIGIT-T25 | 2579 | EVQLVESGGGLVQPGGSLRLSCAASGRIFRRNSMGWFRQAPGKEREFVAVI | | | | |
| | | TRSGGGEMTTYADSVKGRFTINADNSKNTAYLQMNSLKPEDTAVYYCAMS | | | | |
| | | SVTHGSSDWGQGTLVTVSS | | | | |
| TIGIT-T26 | 2580 | EVQLVESGGGLVQPGGSLRLSCAASGRYFRRNSMGWFRQAPGKEREFVAV | | | | |
| | | ITRSGGGEVTTYADSVKGRFTINADNSKNTAYLQMNSLKPEDTAVYYCAM | | | | |
| | | SSVPRGSSDWGQGTLVTVSS | | | | |
| TIGIT-T27 | 2581 | EVQLVESGGGLVQPGGSLRLSCAASGRIFRRNSMGWFRQAPGKEREFVAVL | | | | |
| | | TRSGGGEVTTYADSVKGRFTINADNSKNTAYLQMNSLKPEDTAVYYCAMS | | | | |
| | | SVTPGSSDWGQGTLVTVSS | | | | |
| TIGIT-T28 | 2582 | EVQLVESGGGLVQPGGSLRLSCAASGRIFRRNSMGWFRQAPGKEREFVAVI | | | | |
| | | TRSGGGELTTYADSVKGRFTINADNSKNTAYLQMNSLKPEDTAVYYCAMS | | | | |
| | | SLTRGSSDWGQGTLVTVSS | | | | |
| TIGIT-T29 | 2583 | EVQLVESGGGLVQPGGSLRLSCAASGPIFRRNSMGWFRQAPGKEREFVAVI | | | | |
| | | TRSGGGEVTTYADSVKGRFTINADNSKNTAYLQMNSLKPEDTAVYYCAMS | | | | |
| | | SYTRGSSDWGQGTLVTVSS | | | | |
| TIGIT-T30 | 2584 | EVQLVESGGGLVQPGGSLRLSCAASGRIFRRRSMGWFRQAPGKEREFVAVI | | | | |
| | | TMSGGGEVTTYADSVKGRFTINADNSKNTAYLQMNSLKPEDTAVYYCAM | | | | |
| | | SSVTRGSSDWGQGTLVTVSS | | | | |
| TIGIT-T31 | 2585 | EVQLVESGGGLVQPGGSLRLSCAASGRIFHRNSMGWFRQAPGKEREFVAVI | | | | |
| | | TRSGGGEVTTYADSVKGRFTINADNSKNTAYLQMNSLKPEDTAVYYCAMS | | | | |
| | | SVRRGSSDWGQGTLVTVSS | | | | |
| TIGIT-T32 | 2586 | EVQLVESGGGLVQPGGSLRLSCAASTRIFRRNSMGWFRQAPGKEREFVAVI | | | | |
| | | TRSGGREVTTYADSVKGRFTINADNSKNTAYLQMNSLKPEDTAVYYCAMS | | | | |
| | | GVTRGSSDWGQGTLVTVSS | | | | |
| TIGIT-T33 | 2587 | EVQLVESGGGLVQPGGSLRLSCAASGPIFRRNSMGWFRQAPGKEREFVAVI | | | | |
| | | TRSGGGEVTTYADSVKGRFTINADNSKNTAYLQMNSLKPEDTAVYYCAMS | | | | |
| | | SVTRGSADWGQGTLVTVSS | | | | |
| TIGIT-T34 | 2588 | EVQLVESGGGLVQPGGSLRLSCAASGRIFRRNSMGWFRQAPGKEREFVAVI | | | | |
| | | TRSGGGEMTTYADSVKGRFTINADNSKNTAYLQMNSLKPEDTAVYYCAMS | | | | |
| | | KVTRGSSDWGQGTLVTVSS | | | | |
| TIGIT-T35 | 2589 | EVQLVESGGGLVQPGGSLRLSCAASGRIFRRNSMGWFRQAPGKEREFVAVI | | | | |
| | | TRSGWGEVTTYADSVKGRFTINADNSKNTAYLQMNSLKPEDTAVYYCAM | | | | |
| | | SSVTRGTSDWGQGTLVTVSS | | | | |
| TIGIT-T36 | 2590 | EVQLVESGGGLVQPGGSLRLSCAASGRIFRRNSMGWFRQAPGKEREFVAVI | | | | |
| | | TRSGGGEVTTYADSVKGRFTINADNSKNTAYLQMNSLKPEDTAVYYCAMS | | | | |
| | | SVPGGSSDWGQGTLVTVSS | | | | |
| TIGIT-T37 | 2591 | EVQLVESGGGLVQPGGSLRLSCAASGRIFRRNSMGWFRQAPGKEREFVAVI | | | | |
| | | TRSGGGEVTTYADSVKGRFTINADNSKNTAYLQMNSLKPEDTAVYYCAMS | | | | |
| | | SVGRGSSDWGQGTLVTVSS | | | | |
| TIGIT-T38 | 2592 | EVQLVESGGGLVQPGGSLRLSCAASGRIFRRNSMGWFRQAPGKEREFVAVI | | | | |
| | | TRSGGGEVTTYADSVKGRFTINADNSKNTAYLQMNSLKPEDTAVYYCAMS | | | | |
| | | SGTRGSSDWGQGTLVTVSS | | | | |
| TIGIT-T39 | 2593 | EVQLVESGGGLVQPGGSLRLSCAASGRIFRRNSMGWFRQAPGKEREFVAVI | | | | |
| | | TRSGGGEVTTYADSVKGRFTINADNSKNTAYLQMNSLKPEDTAVYYCAMS | | | | |
| | | SVTLGSSDWGQGTLVTVSS | | | | |
| TIGIT-T40 | 2594 | EVQLVESGGGLVQPGGSLRLSCAASGRIFRRNSMGWFRQAPGKEREFVAVI | | | | |
| | | TRSGGGEVRTYADSVKGRFTINADNSKNTAYLQMNSLKPEDTAVYYCAMS | | | | |
| | | SVTRGSSDWGQGTLVTVSS | | | | |
| TIGIT-T41 | 2595 | EVQLVESGGGLVQPGGSLRLSCAASGRIFRRNSMGWFRQAPGKEREFVAVI | | | | |
| | | TRSGKGEVTTYADSVKGRFTINADNSKNTAYLQMNSLKPEDTAVYYCAMS | | | | |
| | | SVTRGSSDWGQGTLVTVSS | | | | |
| TIGIT-T42 | 2596 | EVQLVESGGGLVQPGGSLRLSCAASGRIFRRNSMGWFRQAPGKEREFVAVI | | | | |
| | | TRSGGDEVTTYADSVKGRFTINADNSKNTAYLQMNSLKPEDTAVYYCAMS | | | | |
| | | SVTRGSSDWGQGTLVTVSS | | | | |
| TIGIT-T43 | 2597 | EVQLVESGGGLVQPGGSLRLSCAASGRIFRRNSMGWFRQAPGKEREFVAVI | | | | |
| | | TRSGGGEVKTYADSVKGRFTINADNSKNTAYLQMNSLKPEDTAVYYCAMS | | | | |
| | | SVTRGSSDWGQGTLVTVSS | | | | |
| TIGIT-T44 | 2598 | EVQLVESGGGLVQPGGSLRLSCAASGRIFRRNSMGWFRQAPGKEREFVAVI | | | | |
| | | TRSGGGEVTTYADSVKGRFTINADNSKNTAYLQMNSLKPEDTAVYYCAMS | | | | |
| | | SVTRGSSDWGQGTLVTVSS | | | | |
| TIGIT-T45 | 2599 | EVQLVESGGGLVQPGGSLRLSCAASGRIFRRNSMGWFRQAPGKEREFVAVI | | | | |
| | | TRSGGGEVTTYADSVKGRFTINADNSKNTAYLQMNSLKPEDTAVYYCAMS | | | | |
| | | SVTPGSSDWGQGTLVTVSS | | | | |
| TIGIT-T46 | 2600 | EVQLVESGGGLVQPGGSLRLSCAASGRIFRRNSMGWFRQAPGKEREFVAVI | | | | |
| | | TRSGGGEVTTYADSVKGRFTINADNSKNTAYLQMNSLKPEDTAVYYCAMS | | | | |
| | | SYTRGSSDWGQGTLVTVSS | | | | |
| TIGIT-T47 | 2601 | EVQLVESGGGLVQPGGSLRLSCAASGRIFRRNSMGWFRQAPGKEREFVAVI | | | | |
| | | TRSGGGEVTTYADSVKGRFTINADNSKNTAYLQMNSLKPEDTAVYYCAMS | | | | |
| | | SVVRGSSDWGQGTLVTVSS | | | | |
| TIGIT-T48 | 2602 | EVQLVESGGGLVQPGGSLRLSCAASGRIFRRNSMGWFRQAPGKEREFVAVI | | | | |
| | | TRSGGGEVTTYADSVKGRFTINADNSKNTAYLQMNSLKPEDTAVYYCAMS | | | | |
| | | SVTSGSSDWGQGTLVTVSS | | | | |
| TIGIT-T49 | 2603 | EVQLVESGGGLVQPGGSLRLSCAASGRIFRRNSMGWFRQAPGKEREFVAVI | | | | |
| | | TRSGGGEVTTYADSVKGRFTINADNSKNTAYLQMNSLKPEDTAVYYCGMS | | | | |
| | | SVTRGSSDWGQGTLVTVSS | | | | |
| TIGIT-T50 | 2604 | EVQLVESGGGLVQPGGSLRLSCAASGRIFRRNSMGWFRQAPGKEREFVAVI | | | | |
| | | TRSGGGEVTTYADSVKGRFTINADNSKNTAYLQMNSLKPEDTAVYYCAMS | | | | |
| | | SQTRGSSDWGQGTLVTVSS | | | | |
| TIGIT-T51 | 2605 | EVQLVESGGGLVQPGGSLRLSCAASGRIFRRNSMGWFRQAPGKEREFVAVI | | | | |
| | | TRSGGGEVTTYADSVKGRFTINADNSKNTAYLQMNSLKPEDTAVYYCAMS | | | | |
| | | SLTRGSSDWGQGTLVTVSS | | | | |
| TIGIT-T52 | 2606 | EVQLVESGGGLVQPGGSLRLSCAASGRIFRRNSMGWFRQAPGKEREFVAVI | | | | |
| | | TRSGGGEVTTYADSVKGRFTINADNSKNTAYLQMNSLKPEDTAVYYCAMS | | | | |
| | | SVTTGSSDWGQGTLVTVSS | | | | |
| TIGIT-T53 | 2607 | EVQLVESGGGLVQPGGSLRLSCAASGRIFRRNSMGWFRQAPGKEREFVAVI | | | | |
| | | TRSGGGSVTTYADSVKGRFTINADNSKNTAYLQMNSLKPEDTAVYYCAMS | | | | |
| | | SVTRGSSDWGQGTLVTVSS | | | | |
| TIGIT-T54 | 2608 | EVQLVESGGGLVQPGGSLRLSCAASGRIFRRNSMGWFRQAPGKEREFVAVI | | | | |
| | | TRSGGGEVTTYADSVKGRFTINADNSKNTAYLQMNSLKPEDTAVYYCAMS | | | | |
| | | SVTRGQSDWGQGTLVTVSS | | | | |
| TIGIT-T55 | 2609 | EVQLVESGGGLVQPGGSLRLSCAASGRIFHRNSMGWFRQAPGKEREFVAVI | | | | |
| | | TRSGGGEVTTYADSVKGRFTINADNSKNTAYLQMNSLKPEDTAVYYCAMS | | | | |
| | | SVTRGSSDWGQGTLVTVSS | | | | |
| TIGIT-T56 | 2610 | EVQLVESGGGLVQPGGSLRLSCAASGRIFRRNSMGWFRQAPGKEREFVAVI | | | | |
| | | TRSGGGYVTTYADSVKGRFTINADNSKNTAYLQMNSLKPEDTAVYYCAMS | | | | |
| | | SVTRGSSDWGQGTLVTVSS | | | | |
| TIGIT-T57 | 2611 | EVQLVESGGGLVQPGGSLRLSCAASGRIFRRNSMGWFRQAPGKEREFVAVI | | | | |
| | | TRSAGGEVTTYADSVKGRFTINADNSKNTAYLQMNSLKPEDTAVYYCAMS | | | | |
| | | SVRRGSSDWGQGTLVTVSS | | | | |
| TIGIT-T58 | 2612 | EVQLVESGGGLVQPGGSLRLSCAASGRIFRRNSMGWFRQAPGKEREFVAVI | | | | |
| | | TRSGGGEVTTYADSVKGRFTINADNSKNTAYLQMNSLKPEDTAVYYCAMS | | | | |
| | | SVTRGSPDWGQGTLVTVSS | | | | |
| TIGIT-T59 | 2613 | EVQLVESGGGLVQPGGSLRLSCAASGRIFRRNSMGWFRQAPGKEREFVAVI | | | | |
| | | TRSGGGEVTTYADSVKGRFTINADNSKNTAYLQMNSLKPEDTAVYYCAMS | | | | |
| | | SVTRGSGDWGQGTLVTVSS | | | | |
| TIGIT-T60 | 2614 | EVQLVESGGGLVQPGGSLRLSCAASGPIFRRNSMGWFRQAPGKEREFVAVI | | | | |
| | | TRSGGGEVTTYADSVKGRFTINADNSKNTAYLQMNSLKPEDTAVYYCAMS | | | | |
| | | SVTRGSSDWGQGTLVTVSS | | | | |
| TIGIT-T61 | 2615 | EVQLVESGGGLVQPGGSLRLSCAASGRIFRRNSMGWFRQAPGKEREFVAVI | | | | |
| | | TRSGRGEVTTYADSVKGRFTINADNSKNTAYLQMNSLKPEDTAVYYCAMS | | | | |
| | | SVTRGSSDWGQGTLVTVSS | | | | |
| TIGIT-T62 | 2616 | EVQLVESGGGLVQPGGSLRLSCAASGRIFRRNSMGWFRQAPGKEREFVAVI | | | | |
| | | TRSGNGEVTTYADSVKGRFTINADNSKNTAYLQMNSLKPEDTAVYYCAMS | | | | |
| | | SVTRGSSDWGQGTLVTVSS | | | | |
| TIGIT-T63 | 2617 | EVQLVESGGGLVQPGGSLRLSCAASGRIFRRNSMGWFRQAPGKEREFVAVI | | | | |
| | | TRSGGGEVTTYADSVKGRFTINADNSKNTAYLQMNSLKPEDTAVYYCAMS | | | | |
| | | NVTRGSSDWGQGTLVTVSS | | | | |
| TIGIT-T64 | 2618 | EVQLVESGGGLVQPGGSLRLSCAASGRIFRRNSMGWFRQAPGKEREFVAVI | | | | |
| | | TRTGGGEVTTYADSVKGRFTINADNSKNTAYLQMNSLKPEDTAVYYCAMS | | | | |
| | | SVTRGSSDWGQGTLVTVSS | | | | |
| TIGIT-T65 | 2619 | EVQLVESGGGLVQPGGSLRLSCAASGRIFRRNSMGWFRQAPGKEREFVAVI | | | | |
| | | TRSGGGEVTTYADSVKGRFTINADNSKNTAYLQMNSLKPEDTAVYYCAMS | | | | |
| | | SVTRGTSDWGQGTLVTVSS | | | | |
| TIGIT-T66 | 2620 | EVQLVESGGGLVQPGGSLRLSCAASGRIFRRNSMGWFRQAPGKEREFVAVL | | | | |
| | | TRSGGGEVTTYADSVKGRFTINADNSKNTAYLQMNSLKPEDTAVYYCAMS | | | | |
| | | SVTRGSSDWGQGTLVTVSS | | | | |
| TIGIT-T67 | 2621 | EVQLVESGGGLVQPGGSLRLSCAASGRIFRRNSMGWFRQAPGKEREFVAVI | | | | |
| | | ARSGGGEVTTYADSVKGRFTINADNSKNTAYLQMNSLKPEDTAVYYCAMS | | | | |
| | | SVTRGSSDWGQGTLVTVSS | | | | |
| TIGIT-T68 | 2622 | EVQLVESGGGLVQPGGSLRLSCAASGRIFRRNSMGWFRQAPGKEREFVAVI | | | | |
| | | TRSGGGEVTTYADSVKGRFTINADNSKNTAYLQMNSLKPEDTAVYYCAMS | | | | |
| | | SFTRGSSDWGQGTLVTVSS | | | | |
| TIGIT-T69 | 2623 | EVQLVESGGGLVQPGGSLRLSCAASGRIFRRNSMGWFRQAPGKEREFVAVI | | | | |
| | | TRSGGGEVTTYADSVKGRFTINADNSKNTAYLQMNSLKPEDTAVYYCAMS | | | | |
| | | SSTRGSSDWGQGTLVTVSS | | | | |
| TIGIT-T70 | 2624 | EVQLVESGGGLVQPGGSLRLSCAASGRIFRRNSMGWFRQAPGKEREFVAVI | | | | |
| | | TRSGGGEVTTYADSVKGRFTINADNSKNTAYLQMNSLKPEDTAVYYCAMS | | | | |
| | | STTRGSSDWGQGTLVTVSS | | | | |
| TIGIT-T71 | 2625 | EVQLVESGGGLVQPGGSLRLSCAASGRIFRRNSMGWFRQAPGKEREFVAVI | | | | |
| | | TRSGGQEVTTYADSVKGRFTINADNSKNTAYLQMNSLKPEDTAVYYCAMS | | | | |
| | | SVTRGSSDWGQGTLVTVSS | | | | |
| TIGIT-T72 | 2626 | EVQLVESGGGLVQPGGSLRLSCAASGRIFRRNSMGWFRQAPGKEREFVAVI | | | | |
| | | TRSGGGEVTTYADSVKGRFTINADNSKNTAYLQMNSLKPEDTAVYYCAMS | | | | |
| | | SVTVGSSDWGQGTLVTVSS | | | | |
| TIGIT-T73 | 2627 | EVQLVESGGGLVQPGGSLRLSCAASGRIFRRNSMGWFRQAPGKEREFVAVI | | | | |
| | | TRSGGGEVTTYADSVKGRFTINADNSKNTAYLQMNSLKPEDTAVYYCAMS | | | | |
| | | SPTRGSSDWGQGTLVTVSS | | | | |
| TIGIT-T74 | 2628 | EVQLVESGGGLVQPGGSLRLSCAASGRIFRRNSMGWFRQAPGKEREFVAVI | | | | |
| | | TRSGEGEVTTYADSVKGRFTINADNSKNTAYLQMNSLKPEDTAVYYCAMS | | | | |
| | | SVTRGSSDWGQGTLVTVSS | | | | |
| TIGIT-T75 | 2629 | EVQLVESGGGLVQPGGSLRLSCAASGRIFRRNSMGWFRQAPGKEREFVAVI | | | | |
| | | TRSGGGEVTTYADSVKGRFTINADNSKNTAYLQMNSLKPEDTAVYYCAMS | | | | |
| | | SVTKGSSDWGQGTLVTVSS | | | | |
| TIGIT-T76 | 2630 | EVQLVESGGGLVQPGGSLRLSCAASGRIFRRNSMGWFRQAPGKEREFVAVI | | | | |
| | | TRSGGGEVTTYADSVKGRFTINADNSKNTAYLQMNSLKPEDTAVYYCAMS | | | | |
| | | KVTRGSSDWGQGTLVTVSS | | | | |
| TIGIT-T77 | 2631 | EVQLVESGGGLVQPGGSLRLSCAASGRIFRRNSMGWFRQAPGKEREFVAVI | | | | |
| | | TRSGGGIVTTYADSVKGRFTINADNSKNTAYLQMNSLKPEDTAVYYCAMS | | | | |
| | | SVTRGSSDWGQGTLVTVSS | | | | |
| TIGIT-T78 | 2632 | EVQLVESGGGLVQPGGSLRLSCAASGRIFRRNSMGWFRQAPGKEREFVAVI | | | | |
| | | TRSGGGEVTTYADSVKGRFTINADNSKNTAYLQMNSLKPEDTAVYYCAMS | | | | |
| | | SDTRGSSDWGQGTLVTVSS | | | | |
| TIGIT-T79 | 2633 | EVQLVESGGGLVQPGGSLRLSCAASGRIFRRNSMGWFRQAPGKEREFVAVI | | | | |
| | | TRSGGGEVTTYADSVKGRFTINADNSKNTAYLQMNSLKPEDTAVYYCAMS | | | | |
| | | SVTRGSTDWGQGTLVTVSS | | | | |
| TIGIT-T80 | 2634 | EVQLVESGGGLVQPGGSLRLSCAASGRIFRRNSMGWFRQAPGKEREFVAVI | | | | |
| | | TTSGGGEVTTYADSVKGRFTINADNSKNTAYLQMNSLKPEDTAVYYCAMS | | | | |
| | | SVTRGSSDWGQGTLVTVSS | | | | |
| TIGIT-T81 | 2635 | EVQLVESGGGLVQPGGSLRLSCAASGPIFRRNSMGWFRQAPGKEREFVAVI | | | | |
| | | TRSGGGEVTTYADSVKGRFTINADNSKNTAYLQMNSLKPEDTAVYYCAMS | | | | |
| | | SVTRGSSLWGQGTLVTVSS | | | | |
| TIGIT-T82 | 2636 | EVQLVESGGGLVQPGGSLRLSCAASGRIFRRNSMGWFRQAPGKEREFVAVI | | | | |
| | | TRGGGGEVTTYADSVKGRFTINADNSKNTAYLQMNSLKPEDTAVYYCAMS | | | | |
| | | SVTRGSSDWGQGTLVTVSS | | | | |
| Variant | SEQ ID NO | CDR1 | SEQ ID NO | CDR2 | SEQ ID NO | CDR3 |
| TIGIT-T1 | 2637 | GPIFRRNS | 2719 | ITRSAGGEVT | 2801 | AMSSVPRGS |
| | | | | | | SD |
| TIGIT-T2 | 2638 | GRIFRRNS | 2720 | ITRSGGGEKT | 2802 | AMSSVTRGS |
| | | | | | | SD |
| TIGIT-T3 | 2639 | RRIFRRRS | 2721 | ITRSGGGEVT | 2803 | AMSSVTRGS |
| | | | | | | SD |
| TIGIT-T4 | 2640 | GRIFRRNS | 2722 | ITRSGGGEVT | 2804 | AMSSVPRGS |
| | | | | | | SD |
| TIGIT-T5 | 2641 | GRIFRRNS | 2723 | ITRSGGGEVT | 2805 | AMSSVTRGS |
| | | | | | | VD |
| TIGIT-T6 | 2642 | GRIFRRNS | 2724 | ITRAGGGEVT | 2806 | AMSSVTRGS |
| | | | | | | SD |
| TIGIT-T7 | 2643 | GRIFRRNS | 2725 | ITRSGGGEVT | 2807 | AMSSITRGSS |
| | | | | | | D |
| TIGIT-T8 | 2644 | GRIFRRNS | 2726 | ITRSGGGEVT | 2808 | AMSSETRGS |
| | | | | | | SD |
| TIGIT-T9 | 2645 | GHIFRRNS | 2727 | ITRSGGGEVT | 2809 | AMSSVTRGS |
| | | | | | | SD |
| TIGIT-T10 | 2646 | GRIFRRNS | 2728 | ITRSGGGEVT | 2810 | AMSSVVRGS |
| | | | | | | SH |
| TIGIT-T11 | 2647 | GRTFRRNS | 2729 | ITRSGGGAVT | 2811 | AMSSVTRGS |
| | | | | | | SD |
| TIGIT-T12 | 2648 | GRIFHRNS | 2730 | ITRSGVGEVT | 2812 | AMSSVTRGS |
| | | | | | | SD |
| TIGIT-T13 | 2649 | GRIFRRNS | 2731 | ITRSGGGEVT | 2813 | AMSGVTRGS |
| | | | | | | SD |
| TIGIT-T14 | 2650 | GRIFERNS | 2732 | ITKSGGGEVT | 2814 | AMSSVTRGS |
| | | | | | | SQ |
| TIGIT-T15 | 2651 | GRIFRRNS | 2733 | ITHSGGGEVT | 2815 | AMSSVNRGS |
| | | | | | | SD |
| TIGIT-T16 | 2652 | GGIFRRNS | 2734 | ITRSGGGSVT | 2816 | AMSSVTRGS |
| | | | | | | SD |
| TIGIT-T17 | 2653 | GTIFRRNS | 2735 | ITRSGSGEVT | 2817 | AMSSVTPGS |
| | | | | | | SD |
| TIGIT-T18 | 2654 | GPIFRRNS | 2736 | TTRSGGGEVT | 2818 | AMSSVTRGIS |
| | | | | | | D |
| TIGIT-T19 | 2655 | GRIFRRNS | 2737 | ITRSGCGEVT | 2819 | AMSSVTRGS |
| | | | | | | PD |
| TIGIT-T20 | 2656 | GSIFRRNS | 2738 | ITRSGGGEVT | 2820 | AMSSVERGS |
| | | | | | | AD |
| TIGIT-T21 | 2657 | GRIFRRNS | 2739 | NTRSGTGEVT | 2821 | AMSSVTRGS |
| | | | | | | SD |
| TIGIT-T22 | 2658 | GRIFRRNS | 2740 | ITRAGGGEVT | 2822 | AMSSLTRGS |
| | | | | | | SD |
| TIGIT-T23 | 2659 | GRIFRRNS | 2741 | LTRSGGGEVT | 2823 | GMSSVTRGS |
| | | | | | | SD |
| TIGIT-T24 | 2660 | GRIFHRNS | 2742 | ITRSGGGEVT | 2824 | AMSSLTRGS |
| | | | | | | SD |
| TIGIT-T25 | 2661 | GRIFRRNS | 2743 | ITRSGGGEMT | 2825 | AMSSVTHGS |
| | | | | | | SD |
| TIGIT-T26 | 2662 | GRYFRRNS | 2744 | ITRSGGGEVT | 2826 | AMSSVPRGS |
| | | | | | | SD |
| TIGIT-T27 | 2663 | GRIFRRNS | 2745 | LTRSGGGEVT | 2827 | AMSSVTPGS |
| | | | | | | SD |
| TIGIT-T28 | 2664 | GRIFRRNS | 2746 | ITRSGGGELT | 2828 | AMSSLTRGS |
| | | | | | | SD |
| TIGIT-T29 | 2665 | GPIFRRNS | 2747 | ITRSGGGEVT | 2829 | AMSSYTRGS |
| | | | | | | SD |
| TIGIT-T30 | 2666 | GRIFRRRS | 2748 | ITMSGGGEVT | 2830 | AMSSVTRGS |
| | | | | | | SD |
| TIGIT-T31 | 2667 | GRIFHRNS | 2749 | ITRSGGGEVT | 2831 | AMSSVRRGS |
| | | | | | | SD |
| TIGIT-T32 | 2668 | TRIFRRNS | 2750 | ITRSGGREVT | 2832 | AMSGVTRGS |
| | | | | | | SD |
| TIGIT-T33 | 2669 | GPIFRRNS | 2751 | ITRSGGGEVT | 2833 | AMSSVTRGS |
| | | | | | | AD |
| TIGIT-T34 | 2670 | GRIFRRNS | 2752 | ITRSGGGEMT | 2834 | AMSKVTRGS |
| | | | | | | SD |
| TIGIT-T35 | 2671 | GRIFRRNS | 2753 | ITRSGWGEVT | 2835 | AMSSVTRGT |
| | | | | | | SD |
| TIGIT-T36 | 2672 | GRIFRRNS | 2754 | ITRSGGGEVT | 2836 | AMSSVPGGS |
| | | | | | | SD |
| TIGIT-T37 | 2673 | GRIFRRNS | 2755 | ITRSGGGEVT | 2837 | AMSSVGRGS |
| | | | | | | SD |
| TIGIT-T38 | 2674 | GRIFRRNS | 2756 | ITRSGGGEVT | 2838 | AMSSGTRGS |
| | | | | | | SD |
| TIGIT-T39 | 2675 | GRIFRRNS | 2757 | ITRSGGGEVT | 2839 | AMSSVTLGS |
| | | | | | | SD |
| TIGIT-T40 | 2676 | GRIFRRNS | 2758 | ITRSGGGEVR | 2840 | AMSSVTRGS |
| | | | | | | SD |
| TIGIT-T41 | 2677 | GRIFRRNS | 2759 | ITRSGKGEVT | 2841 | AMSSVTRGS |
| | | | | | | SD |
| TIGIT-T42 | 2678 | GRIFRRNS | 2760 | ITRSGGDEVT | 2842 | AMSSVTRGS |
| | | | | | | SD |
| TIGIT-T43 | 2679 | GRIFRRNS | 2761 | ITRSGGGEVK | 2843 | AMSSVTRGS |
| | | | | | | SD |
| TIGIT-T44 | 2680 | GRIFRRNS | 2762 | ITRSGGGEVT | 2844 | AMSSVTRGS |
| | | | | | | SD |
| TIGIT-T45 | 2681 | GRIFRRNS | 2763 | ITRSGGGEVT | 2845 | AMSSVTPGS |
| | | | | | | SD |
| TIGIT-T46 | 2682 | GRIFRRNS | 2764 | ITRSGGGEVT | 2846 | AMSSYTRGS |
| | | | | | | SD |
| TIGIT-T47 | 2683 | GRIFRRNS | 2765 | ITRSGGGEVT | 2847 | AMSSVVRGS |
| | | | | | | SD |
| TIGIT-T48 | 2684 | GRIFRRNS | 2766 | ITRSGGGEVT | 2848 | AMSSVTSGS |
| | | | | | | SD |
| TIGIT-T49 | 2685 | GRIFRRNS | 2767 | ITRSGGGEVT | 2849 | GMSSVTRGS |
| | | | | | | SD |
| TIGIT-T50 | 2686 | GRIFRRNS | 2768 | ITRSGGGEVT | 2850 | AMSSQTRGS |
| | | | | | | SD |
| TIGIT-T51 | 2687 | GRIFRRNS | 2769 | ITRSGGGEVT | 2851 | AMSSLTRGS |
| | | | | | | SD |
| TIGIT-T52 | 2688 | GRIFRRNS | 2770 | ITRSGGGEVT | 2852 | AMSSVTTGS |
| | | | | | | SD |
| TIGIT-T53 | 2689 | GRIFRRNS | 2771 | ITRSGGGSVT | 2853 | AMSSVTRGS |
| | | | | | | SD |
| TIGIT-T54 | 2690 | GRIFRRNS | 2772 | ITRSGGGEVT | 2854 | AMSSVTRGQ |
| | | | | | | SD |
| TIGIT-T55 | 2691 | GRIFHRNS | 2773 | ITRSGGGEVT | 2855 | AMSSVTRGS |
| | | | | | | SD |
| TIGIT-T56 | 2692 | GRIFRRNS | 2774 | ITRSGGGYVT | 2856 | AMSSVTRGS |
| | | | | | | SD |
| TIGIT-T57 | 2693 | GRIFRRNS | 2775 | ITRSAGGEVT | 2857 | AMSSVRRGS |
| | | | | | | SD |
| TIGIT-T58 | 2694 | GRIFRRNS | 2776 | ITRSGGGEVT | 2858 | AMSSVTRGS |
| | | | | | | PD |
| TIGIT-T59 | 2695 | GRIFRRNS | 2777 | ITRSGGGEVT | 2859 | AMSSVTRGS |
| | | | | | | GD |
| TIGIT-T60 | 2696 | GPIFRRNS | 2778 | ITRSGGGEVT | 2860 | AMSSVTRGS |
| | | | | | | SD |
| TIGIT-T61 | 2697 | GRIFRRNS | 2779 | ITRSGRGEVT | 2861 | AMSSVTRGS |
| | | | | | | SD |
| TIGIT-T62 | 2698 | GRIFRRNS | 2780 | ITRSGNGEVT | 2862 | AMSSVTRGS |
| | | | | | | SD |
| TIGIT-T63 | 2699 | GRIFRRNS | 2781 | ITRSGGGEVT | 2863 | AMSNVTRGS |
| | | | | | | SD |
| TIGIT-T64 | 2700 | GRIFRRNS | 2782 | ITRTGGGEVT | 2864 | AMSSVTRGS |
| | | | | | | SD |
| TIGIT-T65 | 2701 | GRIFRRNS | 2783 | ITRSGGGEVT | 2865 | AMSSVTRGT |
| | | | | | | SD |
| TIGIT-T66 | 2702 | GRIFRRNS | 2784 | LTRSGGGEVT | 2866 | AMSSVTRGS |
| | | | | | | SD |
| TIGIT-T67 | 2703 | GRIFRRNS | 2785 | IARSGGGEVT | 2867 | AMSSVTRGS |
| | | | | | | SD |
| TIGIT-T68 | 2704 | GRIFRRNS | 2786 | ITRSGGGEVT | 2868 | AMSSFTRGS |
| | | | | | | SD |
| TIGIT-T69 | 2705 | GRIFRRNS | 2787 | ITRSGGGEVT | 2869 | AMSSSTRGS |
| | | | | | | SD |
| TIGIT-T70 | 2706 | GRIFRRNS | 2788 | ITRSGGGEVT | 2870 | AMSSTTRGS |
| | | | | | | SD |
| TIGIT-T71 | 2707 | GRIFRRNS | 2789 | ITRSGGQEVT | 2871 | AMSSVTRGS |
| | | | | | | SD |
| TIGIT-T72 | 2708 | GRIFRRNS | 2790 | ITRSGGGEVT | 2872 | AMSSVTVGS |
| | | | | | | SD |
| TIGIT-T73 | 2709 | GRIFRRNS | 2791 | ITRSGGGEVT | 2873 | AMSSPTRGS |
| | | | | | | SD |
| TIGIT-T74 | 2710 | GRIFRRNS | 2792 | ITRSGEGEVT | 2874 | AMSSVTRGS |
| | | | | | | SD |
| TIGIT-T75 | 2711 | GRIFRRNS | 2793 | ITRSGGGEVT | 2875 | AMSSVTKGS |
| | | | | | | SD |
| TIGIT-T76 | 2712 | GRIFRRNS | 2794 | ITRSGGGEVT | 2876 | AMSKVTRGS |
| | | | | | | SD |
| TIGIT-T77 | 2713 | GRIFRRNS | 2795 | ITRSGGGIVT | 2877 | AMSSVTRGS |
| | | | | | | SD |
| TIGIT-T78 | 2714 | GRIFRRNS | 2796 | ITRSGGGEVT | 2878 | AMSSDTRGS |
| | | | | | | SD |
| TIGIT-T79 | 2715 | GRIFRRNS | 2797 | ITRSGGGEVT | 2879 | AMSSVTRGS |
| | | | | | | TD |
| TIGIT-T80 | 2716 | GRIFRRNS | 2798 | ITTSGGGEVT | 2880 | AMSSVTRGS |
| | | | | | | SD |
| TIGIT-T81 | 2717 | GPIFRRNS | 2799 | ITRSGGGEVT | 2881 | AMSSVTRGS |
| | | | | | | SL |
| TIGIT-T82 | 2718 | GRIFRRNS | 2800 | ITRGGGGEVT | 2882 | AMSSVTRGS |
| | | | | | | SD |

TABLE 19
Additional TIGIT Sequences

| Variant | SEQ ID NO | VHH Sequences |
|---|---|---|
| TIGIT-SC1 | 2883 | EVQLVESGGGLVQPGGSLRLSCAASGFTLNDYAMGWFRQAPGKERELVA |
| | | WIARYDGSTLYADSVKGRFTISADNSKNTAYLQMNSLKPEDTAVYYCARV |
| | | DWALNAAPFDYWGQGTLVTVSS |
| TIGIT-SC2 | 2884 | EVQLVESGGGLVQPGGSLRLSCAASGFTLSSNWMGWFRQAPGKEREMVA |
| | | AIDWSGGSALYADSVKGRFTISADNSKNTAYLQMNSLKPEDTAVYYCAKD |
| | | ALSNSARFDHWGQGTLVTVSS |
| TIGIT-SC3 | 2885 | EVQLVESGGGLVQPGGSLRLSCAASGTFQRINAMGWFRQAPGKEREFVSTI |
| | | NWSGSNTYYADSVKGRFTISADNSKNTAYLQMNSLKPEDTAVYYCASSYS |
| | | SSSGLGDIWGQGTLVTVSS |
| TIGIT-SC4 | 2886 | EVQLVESGGGLVQPGGSLRLSCAASGSIDRINAMGWFRQATGKEREWVAS |
| | | VLRGGYTWYADSVKGRFTISADNSKNTAYLQMNSLKPEDTAVYYCARDS |
| | | YSTSFWFDPWGQGTLVTVSS |
| TIGIT-SC5 | 2887 | EVQLVESGGGLVQPGGSLRLSCAASGFAFGDSWMGWFRQAPGKEREWVA |
| | | SVLRGGYTWYADSVKGRFTISADNSKNTAYLQMNSLKPEDTAVYYCARES |
| | | EGWFDPWGQGTLVTVSS |
| TIGIT-SC6 | 2888 | EVQLVESGGGLVQPGGSLRLSCAASGNTFSGGFMGWFRQAPGKEREWVAS |
| | | VLRGGYTWYADSVKGRFTISADNSKNTAYLQMNSLKPEDTAVYYCAISPV |
| | | AWHAKFDSWGQGTLVTVSS |
| TIGIT-SC7 | 2889 | EVQLVESGGGLVQPGGSLRLSCAASGRSFSMYVMGWFRQAPGKEREGVSF |
| | | ISGSDGSTLYADSVKGRFTISADNSKNTAYLQMNSLKPEDTAVYYCARGSI |
| | | AARPVFFDYWGQGTLVTVSS |
| TIGIT-SC8 | 2890 | EVQLVESGGGLVQPGGSLRLSCAASGFAFSSYAMGWFRQAPGKEREFVARI |
| | | TWNGGSAYYADSVKGRFTISADNSKNTAYLQMNSLKPEDTAVYYCAAGA |
| | | TGWFDPWGQGTLVTVSS |
| TIGIT-SC9 | 2891 | EVQLVESGGGLVQPGGSLRLSCAASGNTFSGGFMGWFRQAPGKEREWVAS |
| | | VLRGGYTWYADSVKGRFTISADNSKNTAYLQMNSLKPEDTAVYYCVNGY |
| | | SYGRDYWGQGTLVTVSS |
| TIGIT-SC10 | 2892 | EVQLVESGGGLVQPGGSLRLSCAASGNTFSGGFMGWFRQAPGKEREWVAS |
| | | VLRGGYTWYADSVKGRFTISADNSKNTAYLQMNSLKPEDTAVYYCASDP |
| | | WGTRYFDHWGQGTLVTVSS |
| TIGIT-SC11 | 2893 | EVQLVESGGGLVQPGGSLRLSCAASGNIFSDNLMGWFRQAPGKERELVAAI |
| | | SWSGGETLYADSVKGRFTISADNSKNTAYLQMNSLKPEDTAVYYCAKDAF |
| | | YEPFDPWGQGTLVTVSS |
| TIGIT-SC12 | 2894 | EVQLVESGGGLVQPGGSLRLSCAASGRTFSAYGMGWFRQAPGKEREFVAA |
| | | ITPSSRTTYYADSVKGRFTISADNSKNTAYLQMNSLKPEDTAVYYCAKDNW |
| | | GEWLMPWWGQGTLVTVSS |
| TIGIT-SC13 | 2895 | EVQLVESGGGLVQPGGSLRLSCAASGRTFSFMGWFRQAPGKEREWVASVL |
| | | RGGYTWYADSVKGRFTISADNSKNTAYLQMNSLKPEDTAVYYCATESMD |
| | | YWGQGTLVTVSS |
| TIGIT-SC14 | 2896 | EVQLVESGGGLVQPGGSLRLSCAASGSISSIHAMGWFRQAPGKEREFVATIS |
| | | RSGVGTFYADSVKGRFTISADNSKNTAYLQMNSLKPEDTAVYYCASSYSSS |
| | | SGLGDIWGQGTLVTVSS |
| TIGIT-SC15 | 2897 | EVQLVESGGGLVQPGGSLRLSCAASGSILSFNHIGWFRQAPGKEREGVAWI |
| | | ARYDGSTLYADSVKGRFTISADNSKNTAYLQMNSLKPEDTAVYYCARARG |
| | | GYVDYWGQGTLVTVSS |
| TIGIT-SC16 | 2898 | EVQLVESGGGLVQPGGSLRLSCAASGTTFSSAAMGWFRQAPGKEREWVAS |
| | | VLRGGYTWYADSVKGRFTISADNSKNTAYLQMNSLKPEDTAVYYCARDP |
| | | VELGDYWGQGTLVTVSS |
| TIGIT-SC17 | 2899 | EVQLVESGGGLVQPGGSLRLSCAASGFDFSVSWMGWFRQAPGKEREWVA |
| | | SVLRGGYTWYADSVKGRFTISADNSKNTAYLQMNSLKPEDTAVYYCAREG |
| | | SWFDYWGQGTLVTVSS |
| TIGIT-SC18 | 2900 | EVQLVESGGGLVQPGGSLRLSCAASGFSLDYYAMGWFRQAPGKEREVVAII |
| | | DTNGDNTLYADSVKGRFTISADNSKNTAYLQMNSLKPEDTAVYYCARGRG |
| | | YGDYVGAYWGQGTLVTVSS |
| TIGIT-SC19 | 2901 | EVQLVESGGGLVQPGGSLRLSCAASGRTYDAMGWFRQAPGKEREWVASV |
| | | LRGGYTWYADSVKGRFTISADNSKNTAYLQMNSLKPEDTAVYYCARDVD |
| | | YRFDSWGQGTLVTVSS |
| TIGIT-SC20 | 2902 | EVQLVESGGGLVQPGGSLRLSCAASGNTFSGGFMGWFRQAPGKEREWVAS |
| | | VLRGGYTWYADSVKGRFTISADNSKNTAYLQMNSLKPEDTAVYYCATPRG |
| | | YWGQGTLVTVSS |
| TIGIT-SC21 | 2903 | EVQLVESGGGLVQPGGSLRLSCAASGNTFSGGFMGWFRQAPGKEREWVAS |
| | | VLRGGYTWYADSVKGRFTISADNSKNTAYLQMNSLKPEDTAVYYCARGG |
| | | AGSDWFGPWGQGTLVTVSS |
| TIGIT-SC22 | 2904 | EVQLVESGGGLVQPGGSLRLSCAASGFTLENNMMGWFRQAPGKEREMVA |
| | | AISWSGGSALYADSVKGRFTISADNSKNTAYLQMNSLKPEDTAVYYCARG |
| | | DGYSYGNFDYWGQGTLVTVSS |
| TIGIT-SC23 | 2905 | EVQLVESGGGLVQPGGSLRLSCAASGFTLSSNWMGWFRQAPGKEREWVAS |
| | | VLRGGYTWYADSVKGRFTISADNSKNTAYLQMNSLKPEDTAVYYCARERL |
| | | GWFDPWGQGTLVTVSS |
| TIGIT-SC24 | 2906 | EVQLVESGGGLVQPGGSLRLSCAASGFTFDRSWMGWFRQAPGKEREVVAS |
| | | ITSGGSTYYADSVKGRFTISADNSKNTAYLQMNSLKPEDTAVYYCAADVW |
| | | YGSTWRNWGQGTLVTVSS |
| TIGIT-SC25 | 2907 | EVQLVESGGGLVQPGGSLRLSCAASGNTFSGGFMGWFRQAPGKEREWVAS |
| | | VLRGGYTWYADSVKGRFTISADNSKNTAYLQMNSLKPEDTAVYYCTTVG |
| | | YGDYWGQGTLVTVSS |
| TIGIT-SC26 | 2908 | EVQLVESGGGLVQPGGSLRLSCAASGNAFRINAMGWFRQAPGKEREFVAGI |
| | | IRSGGETLYADSVKGRFTISADNSKNTAYLQMNSLKPEDTAVYYCAGGRAF |
| | | DIWGQGTLVTVSS |
| TIGIT-SC27 | 2909 | EVQLVESGGGLVQPGGSLRLSCAASGLTFSNYVMGWFRQAPGKEREVVAG |
| | | ILSDGRELYADSVKGRFTISADNSKNTAYLQMNSLKPEDTAVYYCARDVFG |
| | | EGHWGQGTLVTVSS |
| TIGIT-SC28 | 2910 | EVQLVESGGGLVQPGGSLRLSCAASGRTFSTDAMGWFRQAPGKEREFVATI |
| | | NWKDGFTYYADSVKGRFTISADNSKNTAYLQMNSLKPEDTAVYYCAGVG |
| | | HDYGDYLFDYWGQGTLVTVSS |
| TIGIT-SC29 | 2911 | EVQLVESGGGLVQPGGSLRLSCAASGFTLENNMMGWFRQAPGKERELVAA |
| | | IDWSGGSTIYADSVKGRFTISADNSKNTAYLQMNSLKPEDTAVYYCARGHD |
| | | YGDYIAYWGQGTLVTVSS |
| TIGIT-SC30 | 2912 | EVQLVESGGGLVQPGGSLRLSCAASGRSFSSDWIGWFRQAPGKERELVAAI |
| | | DWSGGSALYADSVKGRFTISADNSKNTAYLQMNSLKPEDTAVYYCARVN |
| | | WNNVGWFDPWGQGTLVTVSS |
| TIGIT-SC31 | 2913 | EVQLVESGGGLVQPGGSLRLSCAASGRAFESYAMGWFRQAPGKERELVAT |
| | | IGWSGTDYADSVKGRFTISADNSKNTAYLQMNSLKPEDTAVYYCAKGYTS |
| | | GLSDWGQGTLVTVSS |
| TIGIT-SC32 | 2914 | EVQLVESGGGLVQPGGSLRLSCAASGFAFGDSWMGWFRQAPGKERELVA |
| | | AIDWSGGSALYADSVKGRFTISADNSKNTALQMNSLKPEDTAVYYCAKVH |
| | | SDFRAGWDVWGQGTLVTVSS |
| TIGIT-SC33 | 2915 | EVQLVESGGGLVQPGGSLRLSCAASGFLFDSYAMGWFRQAPGKEREFVAA |
| | | VSQSGLLTFYADSVKGRFTISADNSKNTAYLQMNSLKPEDTAVYYCASRTS |
| | | SWWWFDPWGQGTLVTVSS |
| TIGIT-SC34 | 2916 | EVQLVESGGGLVQPGGSLRLSCAASGTTFSPYTMGWFRQAPGKEREFVASI |
| | | NSGSRTNYADSVKGRFTISADNSKNTAYLQMNSLKPEDTAVYYCVRSEIG |
| | | WGQGTLVTVSS |
| TIGIT-SC35 | 2917 | EVQLVESGGGLVQPGGSLRLSCAASGFTLENNMMGWFRQAPGKERELVAA |
| | | ISMSGDDTIYADSVKGRFTISADNSKNTAYLQMNSLKPEDTAVYYCARQGD |
| | | TVMVSGIDYWGQGTLVTVSS |
| TIGIT-SC36 | 2918 | EVQLVESGGGLVQPGGSLRLSCAASGNTFNFNVMGWFRQAPGKEREAVAS |
| | | IWRSGGNTYYADSVKGRFTISADNSKNTAYLQMNSLKPEDTAVYYCARDL |
| | | EWRPYYMDVWGQGTLVTVSS |
| TIGIT-SC37 | 2919 | EVQLVESGGGLVQPGGSLRLSCAASGNTFSGGFMGWFRQAPGKEREWVAS |
| | | VLRGGYTWYADSVKGRFTISADNSKNTAYLQMNSLKPEDTAVYYCVFGG |
| | | VWQDVWGQGTLVTVSS |
| TIGIT-SC38 | 2920 | EVQLVESGGGLVQPGGSLRLSCAASGFTFSEYPMGWFRQAPGKEREFVAV |
| | | VNWNGDSTYYADSVKGRFTISADNSKNTAYLQMNSLKPEDTAVYYCARG |
| | | SDWYRYWGQGTLVTVSS |
| TIGIT-SC39 | 2921 | EVQLVESGGGLVQPGGSLRLSCAASGRTVSSHAMGWFRQAPGKEREFVAA |
| | | ITSSGSTYYADSVKGRFTISADNSKNTAYLQMNSLKPEDTAVYYCASSYSSS |
| | | SGLGDIWGQGTLVTVSS |
| TIGIT-SC40 | 2922 | EVQLVESGGGLVQPGGSLRLSCAASGFSFDRWAMGWFRQAPGKERELVAR |
| | | ISWNGGSTYYADSVKGRFTISADNSKNTAYLQMNSLKPEDTAVYYCARDD |
| | | GWLQFMHWGQGTLVTVSS |
| TIGIT-SC41 | 2923 | EVQLVESGGGLVQPGGSLRLSCAASGMTTIGPMGWFRQAPGKEREFVASIA |
| | | WGDGNTYYADSVKGRFTISADNSKNTAYLQMNSLKPEDTAVYYCVRGGS |
| | | RTLWGQGTLVTVSS |
| TIGIT-SC42 | 2924 | EVQLVESGGGLVQPGGSLRLSCAASGNTFSGGFMGWFRQAPGKEREWVAT |
| | | VLRGGYTWYADSVKGRFTISADNSKNTAYLQMNSLKPEDTAVYYCASGGF |
| | | LASWGQGTLVTVSS |
| TIGIT-SC43 | 2925 | EVQLVESGGGLVQPGGSLRLSCAASGFTFADYAMGWFRQAPGKEREMVA |
| | | AIGWNSGTTEYADSVKGRFTISADNSKNTAYLQMNSLKPEDTAVYYCARD |
| | | TNGWFFDFWGQGTLVTVSS |
| TIGIT-SC44 | 2926 | EVQLVESGGGLVQPGGSLRLSCAASGSIFGLGAMGWFRQAPGKERELVAIT |
| | | WGGSTTLYADSVKGRFTISADNSKNTAYLQMNSLKPEDTAVYYCATDQGQ |
| | | WLFDFWGQGTLVTVSS |
| TIGIT-SC45 | 2927 | EVQLVESGGGLVQPGGSLRLSCAASGGTFNAMGWFRQAPGKEREWVASV |
| | | LRGGYTWYADSVKGRFTISADNSKNTAYLQMNSLKPEDTAVYYCAKDGG |
| | | SSGTYQNWWGQGTLVTVSS |
| TIGIT-SC46 | 2928 | EVQLVESGGGLVQPGGSLRLSCAASGRTFSNYVMGWFRQAPGKERELVASI |
| | | SSFGSTYYADSVKGRFTISADNSKNTAYLQMNSLKPEDTAVYYCARSGGFL |
| | | SDWGQGTLVTVSS |
| TIGIT-SC47 | 2929 | EVQLVESGGGLVQPGGSLRLSCAASGRALNMYVMGWFRQAPGKERELVA |
| | | AIDWSGGSALYADSVKGRFTISADNSKNTAYLQMNSLKPEDTAVYYCASG |
| | | DGYSMDYFDPWGQGTLVTVSS |
| TIGIT-SC48 | 2930 | EVQLVESGGGLVQPGGSLRLSCAASGRTSDIYGMGWFRQAPGKEREAVASI |
| | | WRSGGNTYYADSVKGRFTISADNSKNTAYLQMNSLKPEDTAVYYCASSTL |
| | | DVWGQGTLVTVSS |
| TIGIT-SC49 | 2931 | EVQLVESGGGLVQPGGSLRLSCAASGRTFIGYHMGWFRQAPGKEREFVAAI |
| | | SWTGESTLYADSVKGRFTISADNSKNTAYLQMNSLKPEDTAVYYCARDDY |
| | | GDYRRYFQHWGQGTLVTVSS |
| TIGIT-SC50 | 2932 | EVQLVESGGGLVQPGGSLRLSCAASGIPSIHAMGWFRQAPGKERELVAVIT |
| | | REGSTYYADSVKGRFTISADNSKNTAYLQMNSLKPEDTAVYYCASSYSSSS |
| | | GLGDIWGQGTLVTVSS |
| TIGIT-SC51 | 2933 | EVQLVESGGGLVQPGGSLRLSCAASGRTEANYAMGWFRQAPGKEREFVAA |
| | | ISWDGGATAYADSVKGRFTISADNSKNTAYLQMNSLKPEDTAVYYCGDYE |
| | | GHWGQGTLVTVSS |
| TIGIT-SC52 | 2934 | EVQLVESGGGLVQPGGSLRLSCAASGFLFDSYAMGWFRQAPGKEREFVAAI |
| | | STGGGWRTYADSVKGRFTISADNSKNTAYLQMNSLKPEDTAVYYCAKRG |
| | | NDNWYFDLWGQGTLVTVSS |
| TIGIT-SC53 | 2935 | EVQLVESGGGLVQPGGSLRLSCAASGFTFSPSWMGWFRQAPGKEREWVAS |
| | | VLRGGYTWYADSVKGRFTISADNSKNTAYLQMNSLKPEDTAVYYCAREST |
| | | IVGAIDSWGQGTLVTVSS |
| TIGIT-SC54 | 2936 | EVQLVESGGGLVQPGGSLRLSCAASGFSFDDYVMGWFRQAPGKERELVAV |
| | | IVGEAITRYADSVKGRFTISADNSKNTAYLQMNSLKPEDTAVYYCARRGGS |
| | | GRAFDIWGQGTLVTVSS |
| TIGIT-SC55 | 2937 | EVQLVESGGGLVQPGGSLRLSCAASGFPFDDYAMGWFRQAPGKERELVAV |
| | | IRWTGMNTHYADSVKGRFTISADNSKNTAYLQMNSLKPEDTAVYYCAKGI |
| | | AVAGAFDYWGQGTLVTVSS |
| TIGIT-SC56 | 2938 | EVQLVESGGGLVQPGGSLRLSCAASGNTFSGGFMGWFRQAPGKEREWVAS |
| | | VLRGGYTWYADSVKGRFTISADNSKNTAYLQMNSLKPEDTAVYYCAHSK |
| | | GYNWFDPWGQGTLVTVSS |
| TIGIT-SC57 | 2939 | EVQLVESGGGLVQPGGSLRLSCAASGNTFSGGFMGWFRQAPGKEREWVAS |
| | | VLRGGYTWYADSVKGRFTISADNSKNTAYLQMNSLKPEDTAVYYCTTYRG |
| | | WGQGTLVTVSS |
| TIGIT-SC58 | 2940 | EVQLVESGGGLVQPGGSLRLSCAASGFTLGYYVMGWFRQAPGKEREFVAT |
| | | INWSGTLTSYADSVKGRFTISADNSKNTAYLQMNSLKPEDTAVYYCARWV |
| | | GPKYYFDYWGQGTLVTVSS |
| TIGIT-SC59 | 2941 | EVQLVESGGGLVQPGGSLRLSCAASGRTFSTYVMGWFRQAPGKEREFVAAI |
| | | SAGGSWTGYADSVKGRFTISADNSKNTAYLQMNSLKPEDTAVYYCAREGG |
| | | YRSGWFDHWGQGTLVTVSS |
| TIGIT-SC60 | 2942 | EVQLVESGGGLVQPGGSLRLSCAASGFTFSPSWMGWFRQAPGKEREWVAS |
| | | VLRGGYTWYADSVKGRFTISADNSKNTAYLQMNSLKPEDTAVYYCARDD |
| | | LDYWGQGTLVTVSS |
| TIGIT-SC61 | 2943 | EVQLVESGGGLVQPGGSLRLSCAASGNTFSGGFMGWFRQAPGKEREWVAS |
| | | VLRGGYTWYADSVKGRFTISADNSKNTAYLQMNSLKPEDTAVYYCTRGDT |
| | | AMATFDYWGQGTLVTVSS |
| TIGIT-SC62 | 2944 | EVQLVESGGGLVQPGGSLRLSCAASGRTFSFGWFRQAPGKEREFVASVLRG |
| | | GYTWYADSVKGRFTISADNSKNTAYLQMNSLKPEDTAVYYCAEGGTTAK |
| | | GWFDPWGQGTLVTVSS |
| TIGIT-SC63 | 2945 | EVQLVESGGGLVQPGGSLRLSCAASGRAIGSYGMGWFRQAPGKEREFVATI |
| | | SVSGVYTYYADSVKGRFTISADNSKNTAYLQMNSLKPEDTAVYYCARATP |
| | | GGVVPWGQGTLVTVSS |
| TIGIT-SC64 | 2946 | EVQLVESGGGLVQPGGSLRLSCAASGFAFSNFGMGWFRQAPGKERELVSAI |
| | | GWSGASTYYADSVKGRFTISADNSKNTAYLQMNSLKPEDTAVYYCARRGR |
| | | TIPFDYWGQGTLVTVSS |
| TIGIT-SC65 | 2947 | EVQLVESGGGLVQPGGSLRLSCAASGFTFGNYDMGWFRQAPGKEREFVAA |
| | | ITGSGRSTYYADSVKGRFTISADNSKNTAYLQMNSLKPEDTAVYYCARGRI |
| | | AASGTKVYWYFDLWGQGTLVTVSS |
| TIGIT-SC66 | 2948 | EVQLVESGGGLVQPGGSLRLSCAASGTTFSSAAMGWFRQAPGKEREWVAS |
| | | VLRGGYTWYADSVKGRFTISADNSKNTAYLQMNSLKPEDTAVYYCVTDPR |
| | | QWLGHDYWGQGTLVTVSS |
| TIGIT-SC67 | 2949 | EVQLVESGGGLVQPGGSLRLSCAASGFTFDRSWMGWFRQAPGKEREWVST |
| | | IYSNGTPAYADSVKGRFTISADNSKNTAYLQMNSLKPEDTAVYYCARRGLP |
| | | SYSYGMDVWGQGTLVTVSS |
| TIGIT-SC68 | 2950 | EVQLVESGGGLVQPGGSLRLSCAASGHTFRGYAMGWFRQAPGKEREAVA |
| | | AISWSGDNTYYADSVKGRFTISADNSKNTAYLQMNSLKPEDTAVYYCGDY |
| | | EGHWGQGTLVTVSS |
| TIGIT-SC69 | 2951 | EVQLVESGGGLVQPGGSLRLSCAASGGTFNGRAMGWFRQAPGKEREFVAA |
| | | ISSIGDTYYADSVKGRFTISADNSKNTAYLQMNSLKPEDTAVYYCARWRLD |
| | | RRQGFYYAMDVWGQGTLVTVSS |
| TIGIT-SC70 | 2952 | EVQLVESGGGLVQPGGSLRLSCAASGRTFSSFAMGWFRQAPGKEREFVAAI |
| | | SGSGEDTYYADSVKGRFTISADNSKNTAYLQMNSLKPEDTAVYYCARWRL |
| | | DRRQGFYYAMDVWGQGTLVTVSS |
| TIGIT-SC71 | 2953 | EVQLVESGGGLVQPGGSLRLSCAASGSIRSLNAMGWFRQAPGKEREFVAAI |
| | | NWDSARTYYADSVKGRFTISADNSKNTAYLQMNSLKPEDTAVYYCARWS |
| | | AKRHSDTMTYYMDVWGQGTLVTVSS |
| TIGIT-SC72 | 2954 | EVQLVESGGGLVQPGGSLRLSCAASGGLTFSSYAMGWFRQAPGKEREFVA |
| | | AISWSGGRTYYADSVKGRFTISADNSKNTAYLQMNSLKPEDTAVYYCARW |
| | | SAKRHSDTMTYYMDVWGQGTLVTVSS |
| TIGIT-SC73 | 2955 | EVQLVESGGGLVQPGGSLRLSCAASGSSFSLADYAMGWFRQAPGKEREFV |
| | | AAISYNVGTTYYADSVKGRFTISADNSKNTAYLQMNSLKPEDTAVYYCAR |
| | | WSAKRHSDTMTYYMDVWGQGTLVTVSS |
| TIGIT-SC74 | 2956 | EVQLVESGGGLVQPGGSLRLSCAASGRTFANNAMGWFRQAPGKEREFVAA |
| | | INWSGGNTYYADSVKGRFTISADNSKNTAYLQMNSLKPEDTAVYYCAKWS |
| | | YYGSGLYGMDVWGQGTLVTVSS |
| TIGIT-SC75 | 2957 | EVQLVESGGGLVQPGGSLRLSCAASGFIGNYHAMGWFRQAPGKEREFVAA |
| | | IRWSDGSSYYADSVKGRFTISADNSKNTAYLQMNSLKPEDTAVYYCAKWS |
| | | YYGSGLYGMDVWGQGTLVTVSS |
| TIGIT-SC76 | 2958 | EVQLVESGGGLVQPGGSLRLSCAASGFTFSDYAMGWFRQAPGKERELVARI |
| | | GHDGSTDYADSVKGRFTISADNSKNTAYLQMNSLKPEDTAVYYCLGGLDP |
| | | WGQGTLVTVSS |
| TIGIT-SC77 | 2959 | EVQLVESGGGLVQPGGSLRLSCAASGGAFSTVAMGWFRQAPGKEREAVAS |
| | | IWRSGDSTYYADSVKGRFTISADNSKNTAYLQMNSLKPEDTAVYYCASSYS |
| | | SSSGLGDIWGQGTLVTVSS |
| TIGIT-SC78 | 2960 | EVQLVESGGGLVQPGGSLRLSCAASGLTLNDYAMGWFRQAPGKERELVA |
| | | WIARYDGSTLYADSVKGRFTISADNSKNTAYLQMNSLKPEDTAVYYCARV |
| | | DWALNAAPFDYWGQGTLVTVSS |
| TIGIT-SC79 | 2961 | EVQLVESGGGLVQPGGSLRLSCAASGSILSINTMGWFRQAPGKEREFVAAIT |
| | | SAGGTTYYADSVKGRFTISADNSKNTAYLQMNSLKPEDTAVYYCARWHY |
| | | DILTGYYWLDSWGQGTLVTVSS |
| TIGIT-SC80 | 2962 | EVQLVESGGGLVQPGGSLRLSCAASGNIPPINAMGWFRQAPGKEREFVAAI |
| | | NYSGGSTYYADSVKGRFTISADNSKNTAYLQMNSLKPEDTAVYYCARWH |
| | | YDILTGYYWLDSWGQGTLVTVSS |
| TIGIT-SC81 | 2963 | EVQLVESGGGLVQPGGSLRLSCAASGRSFKDDAMGWFRQAPGKEREFVAA |
| | | ISWSGDSTHYADSVKGRFTISADNSKNTAYLQMNSLKPEDTAVYYCARWV |
| | | WASGTYWIDYWGQGTLVTVSS |
| TIGIT-SC82 | 2964 | EVQLVESGGGLVQPGGSLRLSCAASGSMSSNYAMGWFRQAPGKEREFVAA |
| | | IDWSGGNTYYADSVKGRFTISADNSKNTAYLQMNSLKPEDTAVYYCAKWF |
| | | YYGSGLYTLDVWGQGTLVTVSS |
| TIGIT-SC83 | 2965 | EVQLVESGGGLVQPGGSLRLSCAASGRTFSDDAMGWFRQAPGKEREFVAA |
| | | ISRSGGNTYYADSVKGRFTISADNSKNTAYLQMNSLKPEDTAVYYCAKWF |
| | | YYGSGLYTLDVWGQGTLVTVSS |
| TIGIT-SC84 | 2966 | EVQLVESGGGLVQPGGSLRLSCAASGGTFTIYPMGWFRQAPGKEREWVAG |
| | | INEYGGRYADSVKGRFTISADNSKNTAYLQMNSLKPEDTAVYYCARDLNA |
| | | MGDAYDIWGQGTLVTVSS |
| TIGIT-SC85 | 2967 | EVQLVESGGGLVQPGGSLRLSCAASGRTFSPYTMGWFRQAPGKEREWVAG |
| | | ISQSGGSTAYADSVKGRFTISADNSKNTAYLQMNSLKPEDTAVYYCARDLN |
| | | AMGDAYDIWGQGTLVTVSS |
| TIGIT-SC86 | 2968 | EVQLVESGGGLVQPGGSLRLSCAASGIIASDSAMGWFRQAPGKEREFVAAI |
| | | RWSGKETWYADSVKGRFTISADNSKNTAYLQMNSLKPEDTAVYYCARWG |
| | | GVTFGGVYPLEYWGQGTLVTVSS |
| TIGIT-SC87 | 2969 | EVQLVESGGGLVQPGGSLRLSCAASGSIDTINTMGWFRQAPGKEREFVAAI |
| | | TPSSRTTYYVDSVKGRFTISADNSKNTAYLQMNSLKPEDTAVYYCARWGG |
| | | VTFGGVYPLEYWGQGTLVTVSS |
| TIGIT-SC88 | 2970 | EVQLVESGGGLVQPGGSLRLSCAASGFTFSSDWMGWFRQAPGKEREFVAA |
| | | INRSGHSTSYADSVKGRFTISADNSKNTAYLQMNSLKPEDTAVYYCARWG |
| | | GVTFGGVYPLEYWGQGTLVTVSS |
| TIGIT-SC89 | 2971 | EVQLVESGGGLVQPGGSLRLSCAASGSMSSINAMGWFRQAPGKEREFVAAI |
| | | NYEGDRTYYADSVKGRFTISADNSKNTAYLQMNSLKPEDTAVYYCARWT |
| | | RGLVSGTYYYYMDVWGQGTLVTVSS |
| TIGIT-SC90 | 2972 | EVQLVESGGGLVQPGGSLRLSCAASGDTFSSKAMGWFRQAPGKEREFVAAI |
| | | RWSVSSTYYADSVKGRFTISADNSKNTAYLQMNSLKPEDTAVYYCARWTR |
| | | GLVSGTYYYYMDVWGQGTLVTVSS |
| TIGIT-SC91 | 2973 | EVQLVESGGGLVQPGGSLRLSCAASGFTFSNYAMGWFRQAPGKEREFVAAI |
| | | NWNSRSTYYADSVKGRFTISADNSKNTAYLQMNSLKPEDTAVYYCARWRS |
| | | IWSGYDDYYYMDVWGQGTLVTVSS |
| TIGIT-SC92 | 2974 | EVQLVESGGGLVQPGGSLRLSCAASGSTIENYAMGWFRQAPGKEREFVAAI |
| | | DWSGGSTYYADSVKGRFTISADNSKNTAYLQMNSLKPEDTAVYYCARWR |
| | | SIWSGYDDYYYMDVWGQGTLVTVSS |
| TIGIT-SC93 | 2975 | EVQLVESGGGLVQPGGSLRLSCAASSRTVSSHAMGWFRQAPGKEREFVAAI |
| | | SWSGVTTYYADSVKGRFTISADNSKNTAYLQMNSLKPEDTAVYYCARWRS |
| | | IWSGYDDYYYMDVWGQGTLVTVSS |
| TIGIT-SC94 | 2976 | EVQLVESGGGLVQPGGSLRLSCAASGSSFSAYAMGWFRQAPGKEREFVSLI |
| | | NWSSGKTIYADSVKGRFTISADNSKNTAYLQMNSLKPEDTAVYYCARVRIF |
| | | NHVHRPSYYFDYWGQGTLVTVSS |
| TIGIT-SC95 | 2977 | EVQLVESGGGLVQPGGSLRLSCAASGPTFSTNVMGWFRQAPGKEREFVSSI |
| | | HWGGSSTVYADSVKGRFTISADNSKNTAYLQMNSLKPEDTAVYYCVTYSA |
| | | YDFRNAWGQGTLVTVSS |
| TIGIT-SC96 | 2978 | EVQLVESGGGLVQPGGSLRLSCAASGMTTIGPMGWFRQAPGKEREFVAAIN |
| | | WSGSSTVYADSVKGRFTISADNSKNTAYLQMNSLKPEDTAVYYCVTYSAY |
| | | DFRNAWGQGTLVTVSS |
| TIGIT-SC97 | 2979 | EVQLVESGGGLVQPGGSLRLSCAASGTAASFNPMGWFRQAPGKEREFVAAI |
| | | SWSGGSTNYADSVKGRFTISADNSKNTAYLQMNSLKPEDTAVYYCVTYSA |
| | | YDFRNAWGQGTLVTVSS |
| TIGIT-SC98 | 2980 | EVQLVESGGGLVQPGGSLRLSCAASGNTFSGGFMGWFRQAPGKEREWVAS |
| | | VLRGGYTWYADSVKGRFTISADNSKNTAYLQMNSLKPEDTAVYYCTTEGF |
| | | DPWGQGTLVTVSS |
| TIGIT-SC99 | 2981 | EVQLVESGGGLVQPGGSLRLSCAASGSIFSMNTMGWFRQAPGKEREFVGAI |
| | | NWSGGSTIYADSVKGRFTISADNSKNTAYLQMNSLKPEDTAVYYCARWDY |
| | | DILTNYYWLEYWGQGTLVTVSS |
| TIGIT-SC100 | 2982 | EVQLVESGGGLVQPGGSLRLSCAASGRTLSDRAMGWFRQAPGKEREFVAA |
| | | ITDNGGSTYYADSVKGRFTISADNSKNTAYLQMNSLKPEDTAVYYCARWY |
| | | SSSGDYYYMDVWGQGTLVTVSS |
| TIGIT-SC101 | 2983 | EVQLVESGGGLVQPGGSLRLSCAASGRTFSSYAMGWFRQAPGKEREFVAAI |
| | | DWSDGSTYYADSVKGRFTISADNSKNTAYLQMNSLKPEDTAVYYCARWY |
| | | SSSGDYYYMDVWGQGTLVTVSS |
| TIGIT-SC102 | 2984 | EVQLVESGGGLVQPGGSLRLSCAASGSTFSKHHAMGWFRQAPGKEREFVA |
| | | AIRWSGGNTYYADSVKGRFTISADNSKNTAYLQMNSLKPEDTAVYYCARW |
| | | YSSSGDYYYMDVWGQGTLVTVSS |
| TIGIT-SC103 | 2985 | EVQLVESGGGLVQPGGSLRLSCAASGTITSAVFMGWFRQAPGKEREFVAAI |
| | | SWSGGDTNYADSVKGRFTISADNSKNTAYLQMNSLKPEDTAVYYCARWG |
| | | GITFGGVYPLDYWGQGTLVTVSS |
| TIGIT-SC104 | 2986 | EVQLVESGGGLVQPGGSLRLSCAASGFTFSTYTMGWFRQAPGKEREFVAAI |
| | | SPSGNTYYADSVKGRFTISADNSKNTAYLQMNSLKPEDTAVYYCARWGGI |
| | | TFGGVYPLDYWGQGTLVTVSS |
| TIGIT-SC105 | 2987 | EVQLVESGGGLVQPGGSLRLSCAASGFAFSRYGMGWFRQAPGKERELVATI |
| | | GWSGSSTFYADSVKGRFTISADNSKNTAYLQMNSLKPEDTAVYYCARDGG |
| | | PYYYGLDVWGQGTLVTVSS |
| TIGIT-SC106 | 2988 | EVQLVESGGGLVQPGGSLRLSCAASGFPFDDYAMGWFRQAPGKERELVAV |
| | | IRWTGMSTHYADSVKGRFTISADNSKNTAYLQMNSLKPEDTAVYYCAKGI |
| | | AVAGAFDYWGQGTLVTVSS |
| TIGIT-SC107 | 2989 | EVQLVESGGGLVQPGGSLRLSCAASGFAFSSDWMGWFRQAPGKEREGVA |
| | | WIARYDGSTLYADSVKGRFTISADNSKNTAYLQMNSLKPEDTAVYYCAKD |
| | | LDSSGRFFQHWGQGTLVTVSS |
| TIGIT-SC108 | 2990 | EVQLVESGGGLVQPGGSLRLSCAASGNTFSGGFMGWFRQAPGKEREWVAS |
| | | VLRGGYTWYADSVKGRFTISADNSKNTAYLQMNSLKPEDTAVYYCANGG |
| | | RVWWAFDYWGQGTLVTVSS |
| TIGIT-SC109 | 2991 | EVQLVESGGGLVQPGGSLRLSCAASGRDISSYIMGWFRQAPGKERELVAIID |
| | | TNGDDTLYADSAKGRFTISADNSKNTAYLQMNSLKPEDTAVYYCANGGRV |
| | | WWAFDYWGQGTLVTVSS |
| TIGIT-SC110 | 2992 | EVQLVESGGGLVQPGGSLRLSCAASGNTFSGGFMGWFRQAPGKEREWVAS |
| | | VLRGGYTWYADSVKGRFTISADNSKNTAYLQMNSLKPEDTAVYYCARDH |
| | | TAMVAPFDYWGQGTLVTVSS |
| TIGIT-SC111 | 2993 | EVQLVESGGGLVQPGGSLRLSCAASGDTFSGGFMGWFRQAPGKEREWVAS |
| | | VLRGGYTWYADSVKGRFTISADNSKNTAYLQMNSLKPEDTAVYYCTRGG |
| | | MDVWGQGTLVTVSS |
| TIGIT-SC112 | 2994 | EVQLVESGGGLVQPGGSLRLSCAASGRTLRRYVMGWFRQAPGKERELVAA |
| | | IDWSGGSALYADSVKGRFTISADNSKNTAYLQMNSLKPEDTAVYYCTWGD |
| | | GYNLGAFDIWGQGTLVTVSS |
| TIGIT-SC113 | 2995 | EVQLVESGGGLVQPGGSLRLSCAASGFTLNDYAMGWFRQAPGKERELVA |
| | | WIARYDGSTLYADSVKGRFTISADNSKNTAYLQMNSLKPEDTAVYYCTWG |
| | | DGYNLGAFDIWGQGTLVTVSS |
| TIGIT-SC114 | 2996 | EVQLVESGGGLVQPGGSLRLSCAASGNTFSGGFMGWFRQAPGKEREWVAS |
| | | VLRGGYTWYADSVKGRFTISADNSKNTAYLQMNSLKPEDTAVYYCATVG |
| | | GRQRTLFDDWGQGTLVTVSS |
| TIGIT-SC115 | 2997 | EVQLVESGGGLVQPGGSLRLSCAASGNTFSGGFMGWFRQAPGKEREWVAS |
| | | VLRGGYTWYADSVKGRFTISADNSKNTAYLQMNSLKPEDTAVYYCAGTG |
| | | LWGQGTLVTVSS |
| TIGIT-SC116 | 2998 | EVQLVESGGGLVQPGGSLRLSCAASGFTFSPSWMGWFRQAPGKEREWVAS |
| | | VLRGGYTWYADSVKGRFTISADNSKNTAYLQMNSLKPEDTAVYYCDAAD |
| | | YWGQGTLVTVSS |
| TIGIT-SC117 | 2999 | EVQLVESGGGLVQPGGSLRLSCAASGNTFSGGFMGWFRQAPGKEREWVAS |
| | | VLRGGYTWYADSVKGRFTISADNSKNTAYLQMNSLKPEDTAVYYCDAAD |
| | | YWGQGTLVTVSS |
| TIGIT-SC118 | 3000 | EVQLVESGGGLVQPGGSLRLSCAASGRTFSFMGWFRQAPGKEREWVASVL |
| | | RGGYTWYADSVKGRFTISADNSKNTAYLQMNSLKPEDTAVYYCAKDGGW |
| | | FDPWGQGTLVTVSS |
| TIGIT-SC119 | 3001 | EVQLVESGGGLVQPGGSLRLSCAASGNTFSGGFMGWFRQAPGKEREWVAS |
| | | VLRGGYTWYADSVKGRFTISADNSKNTAYLQMNSLKPEDTAVYYCAKDG |
| | | GWFDPWGQGTLVTVSS |
| TIGIT-SC120 | 3002 | EVQLVESGGGLVQPGGSLRLSCAASGFTFSPSWMGWFRQAPGKEREWVAS |
| | | VLRGGYTWYADSVKGRFTISADNSKNTAYLQMNSLKPEDTAVYYCAKDG |
| | | GWFDPWGQGTLVTVSS |
| TIGIT-SC121 | 3003 | EVQLVESGGGLVQPGGSLRLSCAASGFTFSPSWMGWFRQAPGKEREWVAS |
| | | VLRGGYTWYADSVKGRFTISADNSKNTAYLQMNSLKPEDTAVYYCTTEGF |
| | | DPWGQGTLVTVSS |
| TIGIT-SC122 | 3004 | EVQLVESGGGLVQPGGSLRLSCAASGFSFDDYVMGWFRQAPGKEREFVAA |
| | | ISMSGGYTHYADSVKGRFTISADNSKNTAYLQMNSLKPEDTAVYYCAREG |
| | | YYGSGSYLVYWGQGTLVTVSS |
| TIGIT-SC123 | 3005 | EVQLVESGGGLVQPGGSLRLSCAASGSIFSGNTMGWFRQAPGKEREFVAAI |
| | | SWSGAYTEYADSVKGRFTISADNSKNTAYLQMNSLKPEDTAVYYCAREGY |
| | | YGSGSYLVYWGQGTLVTVSS |
| TIGIT-SC124 | 3006 | EVQLVESGGGLVQPGGSLRLSCAASGSIFSSNWMGWFRQAPGKEREMVAA |
| | | IDWSGGSALYADSVKGRFTISADNSKNTAYLQMNSLKPEDTAVYYCAKDA |
| | | LSNSARFDHWGQGTLVTVSS |
| TIGIT-SC125 | 3007 | EVQLVESGGGLVQPGGSLRLSCAASGFTLSGNWMGWFRQAPGKEREMVA |
| | | AIDWSGGSALYADSVKGRFTISADNSKNTAYLQMNSLKPEDTAVYYCAKD |
| | | ALSNSARFDHWGQGTLVTVSS |
| TIGIT-SC126 | 3008 | EVQLVESGGGLVQPGGSLRLSCAASGSIFSGNVMGWFRQAPGKERELVAAI |
| | | SNSASSTVYADSVKGRFTISADNSKNTAYLQMNSLKPEDTAVYYCARDWN |
| | | LFDYWGQGTLVTVSS |
| TIGIT-SC127 | 3009 | EVQLVESGGGLVQPGGSLRLSCAASGSIFSGNAMGWFRQAPGKERELVAAI |
| | | SNSASSTVYADSVKGRFTISADNSKNTAYLQMNSLKPEDTAVYYCARDWN |
| | | LFDYWGQGTLVTVSS |
| TIGIT-SC128 | 3010 | EVQLVESGGGLVQPGGSLRLSCAASGFIGNYHAMGWFRQAPGKEREFVARI |
| | | TSGGSTYYADSVKGRFTISADNSKNTAYLQMNSLKPEDTAVYYCGGFGNW |
| | | GQGTLVTVSS |
| TIGIT-SC129 | 3011 | EVQLVESGGGLVQPGGSLRLSCAASGPTLGSYVMGWFRQAPGKEREFVAA |
| | | ISGSGDDTYYADSVKGRFTISADNSKNTAYLQMNSLKPEDTAVYYCARWR |
| | | EFPGYYFAIDVWGQGTLVTVSS |
| TIGIT-SC130 | 3012 | EVQLVESGGGLVQPGGSLRLSCAASGPTLGSYVTGWFRQAPGKEREFVAAI |
| | | SGSSDDTYYADSVKGRFTISADNSKNTAYLQMNSLKPEDTAVYYCARWRE |
| | | FPGYYFAIDVWGQGTLVTVSS |
| TIGIT-SC131 | 3013 | EVQLVESGGGLVQPGGSLRLSCAASGDTSEIYDMGWFRQAPGKEREFVAIT |
| | | WNSGRIGSNGFATYADSVKGRFTISADNSKNTAYLQMNSLKPEDTAVYYC |
| | | ARWAVGQAFDLWGQGTLVTVSS |
| TIGIT-SC132 | 3014 | EVQLVESGGGLVQPGGSLRLSCAASGFTLENNMMGWFRQAPGKEREFVAA |
| | | ISASGTLRAYADSVKGRFTISADNSKNTAYLQMNSLKPEDTAVYYCATWRP |
| | | NRGRYYDWYFDLWGQGTLVTVSS |
| TIGIT-SC133 | 3015 | EVQLVESGGGLVQPGGSLRLSCAASGFTLENNMMGWFRQAPGKEREFVAA |
| | | ISASGTLRAYADSVKGRFTISADNSKNTAYLQMNSLKPEDTAVYYCACGRV |
| | | SGAFIYFDYWGQGTLVTVSS |
| TIGIT-SC134 | 3016 | EVQLVESGGGLVQPGGSLRLSCAASGFTLENNMMGWFRQAPGKEREFVAA |
| | | ISASGTLRAYADSVKGRFTISADNSKNTAYLQMNSLKPEDTAVYYCARWY |
| | | RVNNWSPGYYYYMDVWGQGTLVTVSS |
| TIGIT-SC135 | 3017 | EVQLVESGGGLVQPGGSLRLSCAASGFAFGDSWMGWFRQAPGKEREWVA |
| | | SVLRGGTLRAYAVSVKGRFTISADNSKNAAYLQMNSLKPEDTAVYYCARA |
| | | SIVGTTTLVWGQGTLVTVSS |
| TIGIT-SC136 | 3018 | EVQLVESGGGLVQPGGSLRLSCAASGFTLENNMMGWFRQAPGKEREFVAA |
| | | ISRSGTLKAYADSVKGRFTISADNSKNTAYLQMNSLKPEDTAVYYCARGGE |
| | | LTTFYFGYWGQGTLVTVSS |
| TIGIT-SC137 | 3019 | EVQLVESGGGLVQPGGSLRLSCAASGFTLENNMMGWFRQAPGKEREFVAA |
| | | ISRSGTLKAYADSVKGRFTISADNSKNTAYLQMNSLKPEDTAVYYCSLVSG |
| | | PRWYWGQGTLVTVSS |
| TIGIT-SC138 | 3020 | EVQLVESGGGLVQPGGSLRLSCAASGFTLENNMMGWFRQAPGKGREFVA |
| | | AISRSGTLKAYADSVKGRFTISADNSKNTAYLQMNSLKPEDTAVYYCARVR |
| | | YYYDSSGYFFWFDLWGQGTLVTVSS |
| TIGIT-SC139 | 3021 | EVQLVESGGGLVQPGGSLRLSCAASGFTLENNMMGWFRQAPGKEREFVAA |
| | | ISRSGTLKAYADSVKGRFTISADNSKNTAYLRMNSLKPEDTAVYYCAGLTS |
| | | GGAFSYYWGQGTLVTVSS |
| TIGIT-SC140 | 3022 | EVQLVESGGGLVQPGGSLRLSCAASGNTFSGGFTFDRSWMGWFRQAPGKE |
| | | REWVASVLRGGYTWYADSVKGRFTISADNSKNTAYLQMNSLKPEDTAVY |
| | | YCAGDRYYDFWSGPNSGDYWGQGTLVTVSS |
| TIGIT-SC141 | 3023 | EVQLVESGGGLVQPGGSLRLSCAASGNAFSSSVMGWFRQAPGKEREFVAGI |
| | | WRSGSLKAYADSVKGRFTISADNSKNTAYLQMNSLRPEDTAVYYCARAYV |
| | | GMTTVTFDHWGQGTLVTVSS |
| TIGIT-SC142 | 3024 | EVQLVESGGGLVQPGGSLRLSCAASGFSFDRWAMGWFRQAPGKEREFVAA |
| | | IGWSGNLKAYADSVKGRFTISADNSKNTAYLQMNSLKPEDTAVYYCASGD |
| | | GYSMDYFDPWGQGTLVTVSS |
| TIGIT-SC143 | 3025 | EVQLVESGGGLVQPGGSLRLSCAASGFTLGYYVMGWFRQAPGKEREFVAA |
| | | ISASGTLRAYADSVEGRFTISADNSKNTAYLQMNSLKPEDTAVYYCARAEL |
| | | GYSYGSVDGYWGQGTLVTVSS |
| TIGIT-SC144 | 3026 | EVQLVESGGGLVQPGGSLRLSCAASGFTLENNMMGWFRQAPGKEREFVAA |
| | | ISPSGTLRAYADSVKGRFTISADNSKNTAYLQMNSLKPEDTAVYYCAGIHD |
| | | SGVPLGNWGQGTLVTVSS |
| TIGIT-SC145 | 3027 | EVQLVESGGGLVQPGGSLRLSCAASGNTFSGGFTLGYYVMGWFRQAPGKE |
| | | REFVAAISRSGTLKAYADGVKGRFTISADNSKNTAYLQMNSLKPEDTAVYY |
| | | CARVEAYGDPLGYWGQGTLVTVSS |
| TIGIT-SC146 | 3028 | EVQLVESGGGLVQPGGGLRLSCAASGFTLENNMMGWFRQAPGKEREFVA |
| | | AISASGTLRAYADSVKGRFTISADNSKNTAYLQMNSLKPEDTAVYYCAKG |
| | | GQAGPMAFYFDYWGQGTLVTVSS |
| TIGIT-SC147 | 3029 | EVQLVESGGGLVQPGGSLRLSCAASGTITSAVFMGWFRQAPGKEREFVAA |
| | | VIWRGGSLKSYADSVKGRFTISADNSKNTAYLQMNSLKPEDTAVYYCAKL |
| | | AVAGNYYYYGMDVWGQGTLVTVSS |
| TIGIT-SC148 | 3030 | EVQLVESGGGLVQPGGSLRLSCAASGDIGSINAMGWFRQAPGKEREFVAGI |
| | | WRSGNLKAYADSVKGRFTISADNSKNTAYLQMSSLKPEDTAVYYCARGNI |
| | | VVVPAAFVIWFDPWGQGTLVTVSS |
| TIGIT-SC149 | 3031 | EVQLVESGGGLVQPGGSLRLSCAASGFTLENNMMGWFRQAPGKEREFVAA |
| | | ISRSGTLKAYADSVKGRFTISADNSKNTAYLQMNSLKPEDTAVYYCAKVQ |
| | | GPYCSGGSCYLYTFDLWGQGTLVTVSS |
| TIGIT-SC150 | 3032 | EVQLVESGGGLVQPGGSLRLSCAASGFTLENNMMGWFRQAPGKEREFVAA |
| | | ISRSGTLKAYADSVKGRFTISADNSKNTAYLQVNSLKPEDTAVYYCVRVRG |
| | | YSGYDCDYWGQGTLVTVSS |
| TIGIT-SC151 | 3033 | EVQLVESGGGLVQPGGSLRLSCAASGFPFSIYPMGWFRQAPGKEREFVAAIS |
| | | ASGTLRAYADSVKGRFTISADNSKNTAYLQMNSLKPEDTAVYYCARSSSW |
| | | VRIFDYWGQGTLVTVSS |
| TIGIT-SC152 | 3034 | EVQLVESGGGLVQPGGNLRLSCAASGSTFSKHHAMGWFRQAPGKEREFVA |
| | | GIIRSGTLKAYADSVKGRFTISADNSKNTAYLQMNSLKPEDTAVYYCTRGR |
| | | AARHNLWYFDLWGQGTLVTVSS |
| TIGIT-SC153 | 3035 | EVQLVESGGGLVQPGGSLRLSCAASGNTFSGGFMGWFRQAPGKEREWVAS |
| | | VLRGGYTWYADSVKGRFTISADNSKNTAYLQMNSLKPEDTAVYYCARAG |
| | | GCSGTSCYDGWFDPWGQGTLVTVSS |
| TIGIT-SC154 | 3036 | EVQLVESGGGLVQPGGSLRLSCAASGFAFSSDWMGWFRQAPGKEREWVA |
| | | SVLRGGYTWYADSVKGRFTISADNSKNTAYLQMNSLKPEDTAVYYCAGD |
| | | YRGFEMAFDPWGQGTLVTVSS |
| TIGIT-SC155 | 3037 | EVQLVESGGGLVQPGGSLRLSCAASGNTFSGGFMGWFRQAPGKEREWVAS |
| | | VLRGGYTWYADSVKGRFTISADNSKNTAYLQMNSLKPEDTAVYYCAGDY |
| | | RGFEMAFDPWGQGTLVTVSS |
| TIGIT-SC156 | 3038 | EVQLVESGGGLVQPGGSLRLSCAASGNTFSGGFMGWFRQAPGKEREWVAS |
| | | VLRGGYTWYADSVKGRFTISADNSKNTAYLQMNSLKPEDTAVYYCTTEGY |
| | | DFWSGYYDYWGQGTLVTVSS |
| TIGIT-SC157 | 3039 | EVQLVESGGGLVQPGGSLRLSCAASGFTFSPSWMGWFRQAPGKEREWVAS |
| | | VLRGGYTWYADSVKGRFTISADNSKNTAYLQMNSLKPEDTAVYYCTTEGY |
| | | DFWSGYYDYWGQGTLVTVSS |
| TIGIT-SC158 | 3040 | EVQLVESGGGLVQPGGSLRLSCAASGFTFSPSWMGWFRQAPGKEREWVAS |
| | | VLRGGYTWYADSVKGRFTISADNSKNTAYLQMNSLKPEDTAVYYCAREG |
| | | RSSSPWFDPWGQGTLVTVSS |
| TIGIT-SC159 | 3041 | EVQLVESGGGLVQPGGSLRLSCAASGFTFDRSWMGWFRQAPGKEREWVA |
| | | SVLRGGYTWYADSVKGRFTISADNSKNTAYLQMNSLKPEDTAVYYCAREG |
| | | RSSSPWFDPWGQGTLVTVSS |
| TIGIT-SC160 | 3042 | EVQLVESGGGLVQPGGSLRLSCAASGNTFSGGFMGWFRQAPGKEREWVAS |
| | | VLRGGYTWYADSVKGRFTISADNSKNTAYLQMNSLKPEDTAVYYCAREG |
| | | RSSSPWFDPWGQGTLVTVSS |
| TIGIT-SC161 | 3043 | EVQLVESGGGLVQPGGSLRLSCAASGFTFSPSWMGWFRQAPGKEREWVAS |
| | | VLRGGYTWYADSVKGRFTISADNSKNTAYLQMNSLKPEDTAVYYCTTDRA |
| | | IGVRPLFDHWGQGTLVTVSS |
| TIGIT-SC162 | 3044 | EVQLVESGGGLVQPGGSLRLSCAASGNTFSGGFMGWFRQAPGKEREWVAS |
| | | VLRGGYTWYADSVKGRFTISADNSKNTAYLQMNSLKPEDTAVYYCTTDRA |
| | | IGVRPLFDHWGQGTLVTVSS |
| TIGIT-SC163 | 3045 | EVQLVESGGGLVQPGGSLRLSCAASGFTFDRSWMGWFRQAPGKEREWVA |
| | | SVLRGGYTWYADSVKGRFTISADNSKNTAYLQMNSLKPEDTAVYYCATDK |
| | | RGPHPDYWGQGTLVTVSS |
| TIGIT-SC164 | 3046 | EVQLVESGGGLVQPGGSLRLSCAASGFTFDRSWMGWFRQAPGKEREFVAS |
| | | VLRGGYTWYADSVKGRFTISADNSKNTAYLQMNSLKPEDTAVYYCTTEGS |
| | | GWRNWGQGTLVTVSS |
| TIGIT-SC165 | 3047 | EVQLVESGGGLVQPGGSLRLSCAASGNTFSGGFMGWFRQAPGKEREWVAS |
| | | VLRGGYTWYADSVKGRFTISADNSKNTAYLQMNSLKPEDTAVYYCTTEGS |
| | | GWRNWGQGTLVTVSS |
| TIGIT-SC166 | 3048 | EVQLVESGGGLVQPGGSLRLSCAASGFTFDRSWMGWFRQAPGKEREWVA |
| | | SVLRGGYTWYADSVKGRFTISADNSKNTAYLQMNSLKPEDTAVYYCAREG |
| | | SGYASDYWGQGTLVTVSS |
| TIGIT-SC167 | 3049 | EVQLVESGGGLVQPGGSLRLSCAASGRTFSFMGWFRQAPGKEREWVASVL |
| | | RGGYTWYADSVKGRFTISADNSKNTAYLQMNSLKPEDTAVYYCAREGSG |
| | | YASDYWGQGTLVTVSS |
| TIGIT-SC168 | 3050 | EVQLVESGGGLVQPGGSLRLSCAASGFTFDRSWMGWFRQAPGKEREWVA |
| | | SVLRGGYAWYADSVKGRFTISADNSKNTAYLQMSSLKPEDTAVYYCAREG |
| | | SGYASDYWGQGTLVTVSS |
| TIGIT-SC169 | 3051 | EVQLVESGGGLVQPGGSLRLSCAASGFTLNDYAMGWFRQAPGKERELVA |
| | | WIARYDGSTLYADSVKGRFTISADNSKNTAYLQMNSLKPEDTAVYYCTTEL |
| | | RWELQQPDYWGQGTLVTVSS |
| TIGIT-SC170 | 3052 | EVQLVESGGGLVQPGGSLRLSCAASGHTFSPSWMGWFRQAPGKEREWVAS |
| | | VLRGGYTWYADSVKGRFTISADNSKNTAYLQMNSLKPEDTAVYYCTTELR |
| | | WELQQPDYWGQGTLVTVSS |
| TIGIT-SC171 | 3053 | EVQLVESGGGLVQPGGSLRLSCAASGFTFDRSWMGWFRQAPGKEREWVA |
| | | SVLRGGYTWYADSVKGRFTISADNSKNTAYLQMNSLKPEDTAVYYCATER |
| | | RLGVWGQGTLVTVSS |
| TIGIT-SC172 | 3054 | EVQLVESGGGLVQPGGSLRLSCAASGFTFSPSWMGWFRQAPGKEREWVAS |
| | | VLRGGYTWYADSVKGRFTISADNSKNTAYLQMNSLKPEDTAVYYCATERR |
| | | LGVWGQGTLVTVSS |
| TIGIT-SC173 | 3055 | EVQLVESGGGLVQPGGSLRLSCAASGFTFSPSWMGWFRQAPGKEREWVAS |
| | | VLRGGYTWYADSVKGRFTISADNSKNTAYLQMNSLKPEDTAVYYCATERR |
| | | LGVWGQGTLVTVSS |
| TIGIT-SC174 | 3056 | EVQLVESGGGLVQPGGSLRLSCAASGFLFDSYAMGWFRQAPGKEREFVAAI |
| | | SWSGGSTYYADSVKGRFTISADNSKNTAYLQMNSLKPEDTAVYYCTTDAL |
| | | RFLEWPWWGQGTLVTVSS |
| TIGIT-SC175 | 3057 | EVQLVESGGGLVQPGGSLRLSCAASGNTFSGGFMGWFRQAPGKEREWVAS |
| | | VLRGGYTWYADSVKGRFTISADNSKNTAYLQMNSLKPEDTAVYYCTTDAL |
| | | RFLEWPWWGQGTLVTVSS |
| TIGIT-SC176 | 3058 | EVQLVESGGGLVQPGGSLRLSCAASGFTFSPSWMGWFRQAPGKEREWVAS |
| | | VLRGGYTWYADSVKGRFTISADNSKNTAYLQMNSLKPEDTAVYYCVHEDS |
| | | VAAHFDFWGQGTLVTVSS |
| TIGIT-SC177 | 3059 | EVQLVESGGGLVQPGGSLRLSCAASGFTFSPSWMGWFRQAPGKEREWVAS |
| | | VLRGGYTWYADSVKGRFTISADNSKNTAYLQMNSLKPEDTAVYYCATDR |
| | | GPAMVFNLWGQGTLVTVSS |
| TIGIT-SC178 | 3060 | EVQLVESGGGLVQPGGSLRLSCAASGFTLSPSWMGWFRQAPGKEREWVAS |
| | | VLRGGYTWYADSVKGRFTISADNSKNTAYLQMNSLKPEDTAVYYCASEVA |
| | | SGETDYWGQGTLVTVSS |
| TIGIT-SC179 | 3061 | EVQLVESGGGLVQPGGSLRLSCAASGFTFSPSWMGWFRQAPGKEREWVAS |
| | | VLRGGYTWYADSVKGRFTISADNSKNTAYLQMNSLKPEDTAVYYCASEVA |
| | | SGETDYWGQGTLVTVSS |
| TIGIT-SC180 | 3062 | EVQLVESGGGLVQPGGSLRLSCAASGFTLNDYAMGWFRQAPGKERELVA |
| | | WIARYDGSTLYADSVKGRFTISADNSKNTAYLQMNSLKPEDTAVYYCASE |
| | | VASGETDYWGQGTLVTVSS |
| TIGIT-SC181 | 3063 | EVQLVESGGGLVQPGGSLRLSCAASGFTLSSNWMGWFRQAPGKEREFVAS |
| | | VLRGGYTWYADSVKGRFTISADNSKNTAYLQMNSLKPEDTAVYYCARDA |
| | | YYYGLWGQGTLVTVSS |
| TIGIT-SC182 | 3064 | EVQLVESGGGLVQPGGSLRLSCAASGFTFSSSSMGWFRQAPGKEREFVAAI |
| | | NWSGGSTSYADSVKGRFTISADNSKNTAYLQMNSPKPEDTAVYYCAKDRS |
| | | YSFDYWGQGTLVTVSS |
| TIGIT-SC183 | 3065 | EVQLVESGGGLVQPGGSLRLSCAASGFAFGDSWMGWFRQAPGKEREWVA |
| | | SVLRGGYTWYADSVKGRFTISADNSKNTAYLQMNSLKPEDTAVYYCAKD |
| | | RSYSFDYWGQGTLVTVSS |
| TIGIT-SC184 | 3066 | EVQLVESGGGLVQPGGSLRLSCAASGFTFSPSWMGWFRQAPGKEREWVAS |
| | | VLRGGYTWYADSVKGRFTISADNSKNTAYLQMNSLKPEDTAVYYCTTDRG |
| | | YNWNYDWGQGTLVTVSS |
| TIGIT-SC185 | 3067 | EVQLVESGGGLVQPGGSLRLSCAASGRTFSFMGWFRQAPGKEREWVASVL |
| | | RGGYTWYADSVKGRFTISADNSKNTAYLQMNSLKPEDTAVYYCTTDRGY |
| | | NWNYDWGQGTLVTVSS |
| TIGIT-SC186 | 3068 | EVQLVESGGGLVQPGGSLRLSCAASGNTFSGGFMGWFRQAPGKEREYVAS |
| | | VLRGGYTWYADSVKGRFTISADNSKNTTYLQMNSLKPEDTAVYYCTTDRG |
| | | YNWNYDWGQGTLVTVSS |
| TIGIT-SC187 | 3069 | EVQLVESGGGLVQPGGSLRLSCAASGFTFSPSWMGWFRQAPGKEREWVAS |
| | | VLRGGYTWYADSVKGRFTISADNSKNTAYLQMNSLKPEDTAVYYCTTDSL |
| | | PGWGQGTLVTVSS |
| TIGIT-SC188 | 3070 | EVQLVESGGGLVQPGGSLRLSCAASGNTFSGGFMGWFRQAPGKEREWVAS |
| | | VLRGGYTWYADSVKGRFTISADNSKNTAYLQMNSLKPEDTAVYYCTTDSL |
| | | PGWGQGTLVTVSS |
| TIGIT-SC189 | 3071 | EVQLVESGGGLVQPGGSLRLSCAASGNTFSGGFMGWFRQAPGKEREWVAS |
| | | VLRGGYTWYADSVKGRFTISADNSKNTAYLQMNSLKPEDTAVYYCVTDV |
| | | GAPDYWGQGTLVTVSS |
| TIGIT-SC190 | 3072 | EVQLVESGGGLVQPGGSLRLSCAASGFTFDRSWMGWFRQAPGKEREWVA |
| | | SVLRGGYTWYADSVKGRFTISADNSKNTAYLQMNSLKPEDTAVYYCVTDV |
| | | GAPDYWGQGTLVTVSS |
| TIGIT-SC191 | 3073 | EVQLVESGGGLVQPGGSLRLSCAASGFVFSSDWMGWFRQAPGKEREWVA |
| | | SVLRGGYTWYADSVKGRFTISADNSKNTAYLQMNSLKPEDTAVYYCARG |
| | | DSMDVWGQGTLVTVSS |
| TIGIT-SC192 | 3074 | EVQLVESGGGLVQPGGSLRLSCAASGFTFSVYWMGWFRQAPGKEREFVAA |
| | | ISRSGTLKEYADSVKGRFTISADNSKNTAYLQMNSLKPEDTAVYYCARGSG |
| | | WPKIHFDYWGQGTLVTVSS |
| TIGIT-SC193 | 3075 | EVQLVESGGGLVQPGGSLRLSCAASGFTFSDYWMGWFRQAPGKEREFVAA |
| | | ISRSGTLKAYADSVKGRFTISADNSKNTAYLQMNSLKPEDTAVYYCARGSG |
| | | WPKIHFDYWGQGTLVTVSS |
| TIGIT-SC194 | 3076 | EVQLVESGGGLVQPGGSLRLSCAASGFTFSDYWMGWFRQAPGKEREGVA |
| | | WIARYDGSTLYADSVKGRFTISADNSKNTAYLQMNSLKPEDTAVYYCARG |
| | | EGFDYWGQGTLVTVSS |
| TIGIT-SC195 | 3077 | EVQLVESGGGLVQPGGSLRLSCAASGFAFSSDWMGWFRQAPGKEREWVA |
| | | SVLRGGYTWYADSVKGRFTISADNSKNTAYLQMNSLKPEDTAVYYCARGE |
| | | GFDYWGQGTLVTVSS |
| TIGIT-SC196 | 3078 | EVQLVESGGGLVQPGGSLRLSCAASGFAFSSDWMGWFRQAPGKEREWVA |
| | | SVLRGGYTWYADSVKGRFTISADNSKNTAYLQMNSLKPEDTAVYYCATEG |
| | | LGYWGQGTLVTVSS |
| TIGIT-SC197 | 3079 | EVQLVESGGGLVQPGGSLRLSCAASGFTFDRSWMGWFRQAPGKEREWVA |
| | | SVLRGGYTWYADSVKGRFTISADNSKNTAYLQMNSLKPEDTAVYYCAREG |
| | | RTAGWFDPWGQGTLVTVSS |
| TIGIT-SC198 | 3080 | EVQLVESGGGLVQPGGSLRLSCAASGFTFSPSWMGWFRQAPGKEREYVAS |
| | | VLRGGYTWYADSVKGRFTISADNSKNTAYLQMNSLKPEDTAVYYCASEGD |
| | | PDYWGQGTLVTVSS |
| TIGIT-SC199 | 3081 | EVQLVESGGGLVQPGGSLRLSCAASGFSSAQYAMGWFRQAPGKERELVASI |
| | | DSEGRTNYADSVKGRFTISADNSKNTAYLQMNSLKPEDTAVYYCTRDGGF |
| | | DPWGQGTLVTVSS |
| TIGIT-SC200 | 3082 | EVQLVESGGGLVQPGGSLRLSCAASGNTFSGGFMGWFRQAPGKEREWVAS |
| | | VLRGGYTWYADSVKGRFTISADNSKNTAYLQMNSLKPEDTAVYYCTRDG |
| | | GFDPWGQGTLVTVSS |
| TIGIT-SC201 | 3083 | EVQLVESGGGLVQPGGSLRLSCAASGFTFSPSWMGWFRQAPGKEREWVAS |
| | | VLRGGYTWYADSVKGRFTISADNSKNTAYLQMNSLKPEDTAVYYCTRDG |
| | | GFDPWGQGTLVTVSS |
| TIGIT-SC202 | 3084 | EVQLVESGGGLVQPGGSLRLSCAASGFTFSPSWMGWFRQAPGKEREWVAS |
| | | VLRGGYTWYADSVKGRFTISADNSKNTAYLQMNSLKPEDTAVYYCTTDG |
| | | GYSGIVGFAWGQGTLVTVSS |
| TIGIT-SC203 | 3085 | EVQLVESGGGLVQPGGSLRLSCAASGFTFSPSWMGWFRQAPGKEREWVAS |
| | | VLRGGYTWYADSVKGRFTISADNSKNTAYLQMNSLKPEDTAVYYCARDR |
| | | GGSDWGQGTLVTVSS |
| TIGIT-SC204 | 3086 | EVQLVESGGGLVQPGGSLRLSCAASGFLFNSYWMVWFRQAPGKEREFVAA |
| | | IWRSGTLKAYADSVKGRFTISADNSKNTAYLQMNSLKPEDTAVYYCAADV |
| | | NYGSTWRNWGQGTLVTVSS |
| TIGIT-SC205 | 3087 | EVQLVESGGGLVQPGGSLRLSCAASGFTFDRSWMGWFRQAPGKEREFVAA |
| | | IWRSGTLKAYADSVKGRFTISADNGKNTAYLQMNSLKPEDTAVYYCAEGG |
| | | TTAWGWFVPWGQGTLVTVSS |
| TIGIT-SC206 | 3088 | EVQLVESGGGLVQPGGSLRLSCAASGFLFDSYVMGWFRQAPGKEREFVAAI |
| | | WRSGTLKAYADSVKGRFTISADNSKNTAYLQMNGLKPEDTAVYYCAGVG |
| | | TDYGDYLFNYWGQGTLVTVSS |
| TIGIT-SC207 | 3089 | EVQLVESGGGLVQPGGSLRLSCAASGFAFSSYVMGWFRQAPGKEREFVAAI |
| | | WRSGTLKAYADSVKGRFTISADNSKNTEYLQMNSLKPEDTAVYYCARDDY |
| | | GDTRRYFQHWGQGTLVTVSS |
| TIGIT-SC208 | 3090 | EVQLVESGGGLVQPGGSLRLSCAASGFLFDSYVMGWFRQAPGKEREFVAAI |
| | | WRSGTLKAYADSVKGRFTISADNSKNTEYLQMNSLKPEDTAVYYCARDDY |
| | | GDTRRYFQHWGQGTLVTVSS |
| TIGIT-SC209 | 3091 | EVQLVESGGGLVQPGGSLRLSCAASGFLFNSYWMGWFRQAPGKEREFVAA |
| | | IWRSGTLKAYADSVKGRFTISADNSKNTEYLQMNSLKPEDTAVYYCARDD |
| | | YGDYRIYFQHWGQGTLVTVSS |
| TIGIT-SC210 | 3092 | EVQLVESGGGLVQPGGSLRLSCAASGFLFDSYWMVWFRQAPGKEREFVAA |
| | | IWRSGTLKAYADSVKGRFTISADNSKNTAYLQMNSLKPEDTAVYYCARDH |
| | | RAMVAPFDYWGQGTLVTVSS |
| TIGIT-SC211 | 3093 | EVQLVESGGGLVQPGGSLRLSCAASGFSFSMYVMGWFRQAPGKEREFVAA |
| | | IWRSGTLKAYADSVKGRFTISADNSKNTAYLQMNSLKPGDTAVYYCARDH |
| | | RAMVAPFDYWGQGTLVTVSS |
| TIGIT-SC212 | 3094 | EVQLVESGGGLVQPGGSLRLSCAASGFLFDSYAMGWFRQAPGKEREFVAAI |
| | | WRSGTLKAYADSVKGRFTISADNSKNTAYLQMNSLKPEDTAVYYCARWV |
| | | GASGDYWIDYWGQGTLVTVSS |
| TIGIT-SC213 | 3095 | EVQLVESGGGLVQPGGSLRLSCAASGTFQRINAMGWFRQAPGKEREFVAAI |
| | | WRSGTLKAYADSVKGRFTISADNSKNTAYLQMNSLKPEDTAVYYCARWV |
| | | GASGDYWIDYWGQGTLVTVSS |
| TIGIT-SC214 | 3096 | EVQLVESGGGLVQPGGSLRLSCAASGFTFGDSWMGWFRQAPGKEHEFVAA |
| | | IWRSGTLKAYADSVKGRFTISADNSKNTAYLQMNSLKPEDTAVYYCTSYD |
| | | AVAGTRDFWGQGTLVTVSS |

[0172] While preferred embodiments of the present disclosure have been shown and described herein, it will be obvious to those skilled in the art that such embodiments are provided by way of example only. Numerous variations, changes, and substitutions will now occur to those skilled in the art without departing from the disclosure. It should be understood that various alternatives to the embodiments of the disclosure described herein may be employed in practicing the disclosure. It is intended that the following claims define the scope of the disclosure and that methods and structures within the scope of these claims and their equivalents be covered thereby.

1. An antibody or antibody fragment comprising an amino acid sequence at least about 90% identical to that set forth in any one of SEQ ID NOs: 2239-3096.

2. The antibody or antibody fragment of claim 1, wherein the antibody or antibody fragment comprises an amino acid sequence at least about 95% identical to that set forth in any one of SEQ ID NOs: 2239-3096.

3. The antibody or antibody fragment of claim 1, wherein the antibody is a monoclonal antibody, a polyclonal antibody, a bi-specific antibody, a multispecific antibody, a grafted antibody, a human antibody, a humanized antibody, a synthetic antibody, a chimeric antibody, a camelized antibody, a single-chain Fvs (scFv), a single chain antibody, a Fab fragment, a F(ab′)2 fragment, a Fd fragment, a Fv fragment, a single-domain antibody, an isolated complementarity determining region (CDR), a diabody, a fragment comprised of only a single monomeric variable domain, disulfide-linked Fvs (sdFv), an intrabody, an anti-idiotypic (anti-Id) antibody, or ab antigen-binding fragments thereof.

4. The antibody or antibody fragment of claim 1, wherein the antibody or antibody fragment binds to TIGIT with a K_{D} of less than 75 nM.

5. The antibody or antibody fragment of claim 1, wherein the antibody or antibody fragment binds to TIGIT with a K_{D} of less than 50 nM.

6. The antibody or antibody fragment of claim 1, wherein the antibody or antibody fragment binds to TIGIT with a K_{D} of less than 25 nM.

7. The antibody or antibody fragment of claim 1, wherein the antibody or antibody fragment binds to TIGIT with a K_{D} of less than 10 nM.

8. An antibody or antibody fragment that binds TIGIT, comprising an immunoglobulin heavy chain comprising an amino acid sequence at least about 90% identical to that set forth in any one of SEQ ID NOs: 2555-2636 or 2883-3096.

9. The antibody or antibody fragment of claim 8, wherein the immunoglobulin heavy chain comprises an amino acid sequence at least about 95% identical to that set forth in any one of SEQ ID NOs: 2555-2636 or 2883-3096.

10. The antibody or antibody fragment of claim 8, wherein the immunoglobulin heavy chain comprises an amino acid sequence as set forth in any one of SEQ ID NOs: 2555-2636 or 2883-3096.

11. The antibody or antibody fragment of claim 8, wherein the antibody is a monoclonal antibody, a polyclonal antibody, a bi-specific antibody, a multispecific antibody, a grafted antibody, a human antibody, a humanized antibody, a synthetic antibody, a chimeric antibody, a camelized antibody, a single-chain Fvs (scFv), a single chain antibody, a Fab fragment, a F(ab′)2 fragment, a Fd fragment, a Fv fragment, a single-domain antibody, an isolated complementarity determining region (CDR), a diabody, a fragment comprised of only a single monomeric variable domain, disulfide-linked Fvs (sdFv), an intrabody, an anti-idiotypic (anti-Id) antibody, or ab antigen-binding fragments thereof.

12. The antibody or antibody fragment of claim 8, wherein the antibody or antibody fragment thereof is chimeric or humanized.

13. The antibody or antibody fragment of claim 8, wherein the antibody or antibody fragment binds to TIGIT with a K_{D} of less than 75 nM.

14. The antibody or antibody fragment of claim 8, wherein the antibody or antibody fragment binds to TIGIT with a K_{D} of less than 50 nM.

15. The antibody or antibody fragment of claim 8, wherein the antibody or antibody fragment binds to TIGIT with a K_{D} of less than 25 nM.

16. The antibody or antibody fragment of claim 8, wherein the antibody or antibody fragment binds to TIGIT with a K_{D} of less than 10 nM.

17. A method of treating cancer or a viral infection comprising administering the antibody or antibody fragment of claim 1.

18. (canceled)

The application's sequence listing, which the Patent Office published only in electronic form, follows.

SEQUENCE LISTING (3096 sequences)

SEQ ID NO: 1 - protein, 15 aa, synthetic construct
CARVAGSSGWAFDYW

SEQ ID NO: 2 - protein, 16 aa, synthetic construct
CATLRLYSSGGGIDYW

SEQ ID NO: 3 - protein, 20 aa, synthetic construct
CARIVGATTRTYYYYGMDVW

SEQ ID NO: 4 - protein, 12 aa, synthetic construct
CARVRNRASDIW

SEQ ID NO: 5 - protein, 15 aa, synthetic construct
CARAPYSSSSWFDYW

SEQ ID NO: 6 - protein, 17 aa, synthetic construct
CARNSYGPPRSFGMDVW

SEQ ID NO: 7 - protein, 14 aa, synthetic construct
CARTPYRSGWADYW

SEQ ID NO: 8 - protein, 14 aa, synthetic construct
CTRSWYYYYGMDVW

SEQ ID NO: 9 - protein, 11 aa, synthetic construct
CARGYGGYGYW

SEQ ID NO: 10 - protein, 14 aa, synthetic construct
CAKAGDYDYYFDYW

SEQ ID NO: 11 - protein, 14 aa, synthetic construct
CASVKRWGYYFNWW

SEQ ID NO: 12 - protein, 15 aa, synthetic construct
CARVRVGAYDAFDIW

SEQ ID NO: 13 - protein, 14 aa, synthetic construct
CARNSGWFMPFDYW

SEQ ID NO: 14 - protein, 13 aa, synthetic construct
CARRGSGWYIDSW

SEQ ID NO: 15 - protein, 17 aa, synthetic construct
CARREGDYMGPNWFDPW

SEQ ID NO: 16 - protein, 12 aa, synthetic construct
CASIRERRFDFW

SEQ ID NO: 17 - protein, 23 aa, synthetic construct
CARHSLTPYNFWSGYYSRSFDIW

SEQ ID NO: 18 - protein, 120 aa, synthetic construct
EVQLLESGGGLVQPGGSLRLSCAASGFTFGSYGMSWVRQAPGKGLEWVSSISGSGSTTYYADSVKGRFTISRDNSKNTLYLQMNSLRAEDTAVYYCARVAGSSGWAFDYWGQGTLVTVSS

SEQ ID NO: 19 - protein, 121 aa, synthetic construct
EVQLLESGGGLVQPGGSLRLSCAASGLTFSNYAMTWVRQAPGKGLEWVSGISRSGGSTYYADSVKGRFTISRDNSKNTLYLQMNSLRAEDTAVYYCATLRLYSSGGGIDYWGQGTLVTVSS

SEQ ID NO: 20 - protein, 125 aa, synthetic construct
EVQLLESGGGLVQPGGSLRLSCAASGFTFHNYAMTWVRQAPGKGLEWVSAITGSGTSTYYADSVKGRFTISRDNSKNTLYLQMNSLRAEDTAVYYCARIVGATTRTYYYYGMDVWGQGTLVTVSS

SEQ ID NO: 21 - protein, 117 aa, synthetic construct
EVQLLESGGGLVQPGGSLRLSCAASGFRFGNYAMSWVRQAPGKGLEWVSAITGSGGNTFYADSVKGRFTISRDNSKNTLYLQINSLRAEDTAVYYCARVRNRASDIWGQGTLVTVSS

SEQ ID NO: 22 - protein, 120 aa, synthetic construct
EVQLLESGGGLVQPGGSLRLSCAASGFVFSSYAMNWVRQAPGKGLEWVSTVSGSGGTTYYADSVKGRFTISRDNSKNTLYLQMNSLRAEDTAVYYCARAPYSSSSWFDYWGQGTLVTVSS

SEQ ID NO: 23 - protein, 122 aa, synthetic construct
EVQLLESGGGLVQPGGSLRLSCAASGFTFSRYTMNWVRQAPGKGLEWVSGISGSGGGAYYADSVKGRFTISRDNSKNTLYLQMNSLRAEDTAVYYCARNSYGPPRSFGMDVWGQGTLVTVSS

SEQ ID NO: 24 - protein, 119 aa, synthetic construct
EVQLLESGGGLVQPGGSLRLSCAASGFTFSSYGMTWVRQAPGKGLEWVSAISGRGSSTYYADSVKGRFTISRDNSKNTLYLQMNSLRAEDTAVYYCARTPYRSGWADYWGQGTLVTVSS

SEQ ID NO: 25 - protein, 119 aa, synthetic construct
EVQLLESGGGLVQPGGSLRLSCAASGFMFSDYAMSWVRQAPGKGLEWVSGISGSGGYTYYADSVKGRFTISRDNSKNTLYLQMNSLRAEDTAVYYCTRSWYYYYGMDVWGQGTLVTVSS

SEQ ID NO: 26 - protein, 116 aa, synthetic construct
EVQLLESGGGLVQPGGSLRLSCAASGFAFRSYAMGWVRQAPGKGLEWVSTISGGGGNTYYADSVKGRFTISRDNSKNTLYLQMNSLRAEDTAVYYCARGYGGYGYWGQGTLVTVSS

SEQ ID NO: 27 - protein, 119 aa, synthetic construct
EVQLLESGGGLVQPGGSLRLSCAASGFTFSKSAMSWVRQAPGKGLEWVSAISGSGGLTYYADSVKGRFTISRDNSKNTLYLQMNSLRAEDTAVYYCAKAGDYDYYFDYWGQGTLVTVSS

SEQ ID NO: 28 - protein, 119 aa, synthetic construct
EVQLLESGGGLVQPGGSLRLSCAASGFTFTNYGMSWVRQAPGKGLEWVSSISGSGSTTYYADSVKGRFTISRDNSKNTLYLQMNSLRAEDTAVYYCASVKRWGYYFNWWGQGTLVTVSS

SEQ ID NO: 29 - protein, 120 aa, synthetic construct
EVQLLESGGGLVQPGGSLRLSCAASGFTLSSYAMAWVRQAPGKGLEWVSTLSGSGGSTYYADSVKGRFTISRDNSKNTLYLQMNSLRAEDTAVYYCARVRVGAYDAFDIWGQGTLVTVSS

SEQ ID NO: 30 - protein, 119 aa, synthetic construct
EVQLLESGGGLVQPGGSLRLSCAASGFTFSTYGMNWVRQAPGKGLEWVSTISGSGGSTYFADSVKGRFTISRDNSKNTLYLQMNSLRAEDTAVYYCARNSGWFMPFDYWGQGTLVTVSS

SEQ ID NO: 31 - protein, 118 aa, synthetic construct
EVQLLESGGGLVQPGGSLRLSCAASGFMFSRYAMSWVRQAPGKGLEWVSSISGSGGTTYYADSVKGRFTISRDNSKNTLYLQMNSLRAEDTAVYYCARRGSGWYIDSWGQGTLVTVSS

SEQ ID NO: 32 - protein, 122 aa, synthetic construct
EVQLLESGGGLVQPGGSLRLSCAASGFTFSDYAMGWVRQAPGKGLEWVSTISGSGSRTYYADSVKGRFTISRDNSKNTLYLQMNSLRAEDTAVYYCARREGDYMGPNWFDPWGQGTLVTVSS

SEQ ID NO: 33 - protein, 117 aa, synthetic construct
EVQLLESGGGLVQPGGSLRLSCAASGFAFSSYAMGWVRQAPGKGLEWVSAITSSGGGTYYADSVKGRFTISRDNSKNTLYLQMNSLRAEDTAVYYCASIRERRFDFWGQGTLVTVSS

SEQ ID NO: 34 - protein, 128 aa, synthetic construct
EVQLLESGGGLVQPGGSLRLSCAASGFTFSNHAMAWVRQAPGKGLEWVSGISGSGGYTYYADSVKGRFTISRDNSKNTLYLQMNSLRAEDTAVYYCARHSLTPYNFWSGYYSRSFDIWGQGTLVTVSS

SEQ ID NO: 35 - protein, 119 aa, synthetic construct
EVQLVESGGGLVQAGGSLRLSCAASGSIFSNYAMGWFRQAPGKEREFVATISRGGTRTNYADSVKGRFTISADNAKNTVYLQMNSLKPEDTAVYYCAAAAWTIYAYNYWGQGTQVTVSS

SEQ ID NO: 36 - protein, 124 aa, synthetic construct
EVQLVESGGGLVQAGGSLRLSCAASGRTFSNYGMGWFRQAPGKEREFVSGISGSGGRTSYADSVKGRFTISADNAKNTVYLQMNSLKPEDTAVYYCAANLWYPVDRLNTGFNYWGQGTQVTVSS

SEQ ID NO: 37 - protein, 116 aa, synthetic construct
EVQLVESGGGLVQAGGSLRLSCAASGGTFSGRGMGWFRQAPGKEREWVSSVYIFGGSTYYADSVKGRFTISADNAKNTVYLQMNSLKPEDTAVYYCANSNKPKFDWGQGTQVTVSS

SEQ ID NO: 38 - protein, 118 aa, synthetic construct
EVQLVESGGGLVQAGGSLRLSCAASGFTFSTSWMGWFRQAPGKERELVAARNSGGNTNYADSVKGRFTISADNAKNTVYLQMNSLKPEDTAVYYCAADVWYGSTWRNWGQGTQVTVSS

SEQ ID NO: 39 - protein, 118 aa, synthetic construct
EVQLVESGGGLVQPGGSLRLSCAASGFTFDRSWMGWFRQAPGKEREVVASITSGGSTYYADSVKGRFTISADNSKNTAYLQMNSLKPEDTAVYYCAADVWYGSTWRNWGQGTLVTVSS

SEQ ID NO: 40 - protein, 118 aa, synthetic construct
EVQLVESGGGLVQPGGSLRLSCAASGFTFSTSWMGWFRQAPGKERELVASITSGGSTYYADSVKGRFTISADNSKNTAYLQMNSLKPEDTAVYYCAADVWYGSTWRNWGQGTLVTVSS

SEQ ID NO: 41 - protein, 118 aa, synthetic construct
EVQLVESGGGLVQPGGSLRLSCAASGFTFSTSWMGWFRQAPGKERELVAARNSGGNTNYADSVKGRFTISADNSKNTAYLQMNSLKPEDTAVYYCAADVWYGSTWRNWGQGTLVTVSS

SEQ ID NO: 42 - protein, 118 aa, synthetic construct
EVQLVESGGGLVQPGGSLRLSCAASGFTFDRSWMGWFRQAPGKERELVAAITSGGSTYYADSVKGRFTISADNSKNTAYLQMNSLKPEDTAVYYCAADVWYGSTWRNWGQGTLVTVSS

SEQ ID NO: 43 - protein, 118 aa, synthetic construct
EVQLVESGGGLVQPGGSLRLSCAASGFTFSTSWMGWFRQAPGKERELVAAMTSGGGTNYADSVKGRFTISADNSKNTAYLQMNSLKPEDTAVYYCAADVWYGSTWRNWGQGTLVTVSS

SEQ ID NO: 44 - protein, 120 aa, synthetic construct
EVQLVESGGGLVQPGGSLRLSCAASGRIFRRNSMGWFRQAPGKEREFVAVITRSGGGEVTTYADSVKGRFTINADNSKNTAYLQMNSLKPEDTAVYYCAMSSVTRGSSDWGQGTLVTVST

SEQ ID NO: 45 - protein, 107 aa, synthetic construct
DIQMTQSPSSLSASVGDRVTITCRASQAISNYLNWYQQKPGKAPKLLIYAASRLQSGVPSRFSGSGSGTDFTLTISSLQPEDFATYYCQESYSTPFTFGGGTKVEIK

SEQ ID NO: 46 - protein, 107 aa, synthetic construct
DIQMTQSPSSLSASVGDRVTITCRASQYISTYLNWYQQKPGKAPKLLIYAASSLQGGVPSRFSGSGSGTDFTLTISSLQPEDFATYYCQQNYITPLTFGGGTKVEIK

SEQ ID NO: 47 - protein, 107 aa, synthetic construct
DIQMTQSPSSLSASVGDRVTITCRASQYISSYLNWYQQKPGKAPKLLIYGAFSLQSGVPSRFSGSGSGTDFTLTISSLQPEDFATYYCQQSYITPYTFGGGTKVEIK

SEQ ID NO: 48 - protein, 107 aa, synthetic construct
DIQMTQSPSSLSASVGDRVTITCRASQTIITYLNWYQQKPGKAPKLLIYAASNLRSGVPSRFSGSGSGTDFTLTISSLQPEDFATYYCQQSYSLPWTFGGGTKVEIK

SEQ ID NO: 49 - protein, 107 aa, synthetic construct
DIQMTQSPSSLSASVGDRVTITCRASQSVRSYLNWYQQKPGKAPKLLIYTATSLESGVPSRFSGSGSGTDFTLTISSLQPEDFATYYCQQSYGLPRTFGGGTKVEIK

SEQ ID NO: 50 - protein, 107 aa, synthetic construct
DIQMTQSPSSLSASVGDRVTITCRASQSISKYLNWYQQKPGKAPKLLIYGASSLRGGVPSRFSGSGSGTDFTLTISSLQPEDFATYYCQQSYRPPLTFGGGTKVEIK

SEQ ID NO: 51 - protein, 107 aa, synthetic construct
DIQMTQSPSSLSASVGDRVTITCRASQNIKTYLNWYQQKPGKAPKLLIYAASSLHTGVPSRFSGSGSGTDFTLTISSLQPEDFATYYCQQTYSIPQTFGGGTKVEIK

SEQ ID NO: 52 - protein, 108 aa, synthetic construct
DIQMTQSPSSLSASVGDRVTITCRAGQSIRSYLNWYQQKPGKAPKLLIYASSNLQSGVPSRFSGSGSGTDFTLTISSLQPEDFATYYCQQSYSTPLLTFGGGTKVEIK

SEQ ID NO: 53 - protein, 107 aa, synthetic construct
DIQMTQSPSSLSASVGDRVTITCRASQSIRRYLNWYQQKPGKAPKLLIYAASTLQIGVPSRFSGSGSGTDFTLTISSLQPEDFATYYCQQTYSSPYTFGGGTKVEIK

SEQ ID NO: 54 - protein, 107 aa, synthetic construct
DIQMTQSPSSLSASVGDRVTITCRTSQSIRRYLNWYQQKPGKAPKLLIYRASRLQSGVPSRFSGSGSGTDFTLTISSLQPEDFATYYCQQSYNTLRTFGGGTKVEIK

SEQ ID NO: 55 - protein, 106 aa, synthetic construct
DIQMTQSPSSLSASVGDRVTITCRASQNINYYLNWYQQKPGKAPKLLIYGASSLQNGVPSRFSGSGSGTDFTLTISSLQPEDFATYYCQQSYITPYTGGGTKVEIK

SEQ ID NO: 56 - protein, 107 aa, synthetic construct
DIQMTQSPYSLSASVGDRVTITCRASQSIRRYLNWYQQKPGKAPKLLIYRASTLQTGVPSRFSGSGSGTDFTLTISSLQPEDFATYYCQQTYSSPFTFGGGTKVEIK

SEQ ID NO: 57 - protein, 107 aa, synthetic construct
DIQMTQSPSSLSASVGDRVTITCRTSQSISTYLNWYQQKPGKAPKLLIYATSRLQSGVPSRFSGSGSGTDFTLTISSLQPEDFATYYCQQSYTTPLTFGGGTKVEIK

SEQ ID NO: 58 - protein, 107 aa, synthetic construct
DIQMTQSPSSLSASVGDRVTITCRASQSVSRYLNWYQQKPGKAPKLLIYGSSNLQSGVPSRFSGSGSGTDFTLTISSLQPEDFATYYCQESYSTPFTFGGGTKVEIK

SEQ ID NO: 59 - protein, 107 aa, synthetic construct
DIQMTQSPSSLSASVGDRVTITCRASQAISRNLNWYQQKPGKAPKLLIYGASNLQTGVPSRFSGSGSGTDFTLTISSLQPEDFATYYCQQSHSTPVTFGGGTKVEIK

SEQ ID NO: 60 - protein, 107 aa, synthetic construct
DIQMTQSPSSLSASVGDRVTITCRASQRISTYLNWYQQKPGKAPKLLIYGTSSLQSGVPSRFSGSGSGTDFTLTISSLQPEDFATYYCQQSYIIPWTFGGGTKVEIK

SEQ ID NO: 61 - protein, 107 aa, synthetic construct
DIQMTQSPSSLSASVGDRVTITCRASQSISSYVNWYQQKPGKAPKLLIYGASRLQDGVPSRFSGSGSGTDFTLTISSLQPEDFATYYCQQSYITPYTFGGGTKVEIK

SEQ ID NO: 62 - protein, 9 aa, synthetic construct
RTFSNYAMG

SEQ ID NO: 63 - protein, 9 aa, synthetic construct
RTFDIYAMG

SEQ ID NO: 64 - protein, 9 aa, synthetic construct
FTFSSYAMG

SEQ ID NO: 65 - protein, 9 aa, synthetic construct
STFDTYVMG

SEQ ID NO: 66 - protein, 9 aa, synthetic construct
RTFSIYAMG

SEQ ID NO: 67 - protein, 9 aa, synthetic construct
GTFRSYVMG

SEQ ID NO: 68 - protein, 9 aa, synthetic construct
SIFSNYAMG

SEQ ID NO: 69 - protein, 9 aa, synthetic construct
RTLDDYVMG

SEQ ID NO: 70 - protein, 9 aa, synthetic construct
FTFDNYAMG

SEQ ID NO: 71 - protein, 9 aa, synthetic construct
RTFSNYGMG

SEQ ID NO: 72 - protein, 9 aa, synthetic construct
RTLSSYAMG

SEQ ID NO: 73 - protein, 9 aa, synthetic construct
STFSSYAMG

SEQ ID NO: 74 - protein, 9 aa, synthetic construct
FIFSNYAMG

SEQ ID NO: 75 - protein, 9 aa, synthetic construct
FTFSDYVMG

SEQ ID NO: 76 - protein, 9 aa, synthetic construct
RTFDSYAMG

SEQ ID NO: 77 - protein, 9 aa, synthetic construct
SIFSIYAMG

SEQ ID NO: 78 - protein, 9 aa, synthetic construct
STLSIYAMG

SEQ ID NO: 79 - protein, 9 aa, synthetic construct
STFSNYAMG

SEQ ID NO: 80 - protein, 9 aa, synthetic construct
RTFSSYAMG

SEQ ID NO: 81 - protein, 9 aa, synthetic construct
STFSIYAMG

SEQ ID NO: 82 - protein, 9 aa, synthetic construct
STFSNYAMG

SEQ ID NO: 83 - protein, 9 aa, synthetic construct
SILSSYTMG

SEQ ID NO: 84 - protein, 9 aa, synthetic construct
STFDIYAMG

SEQ ID NO: 85 - protein, 9 aa, synthetic construct
RTFDTYAMG

SEQ ID NO: 86 - protein, 9 aa, synthetic construct
FTFDNYAMG

SEQ ID NO: 87 - protein, 9 aa, synthetic construct
FTFDNYAMG

SEQ ID NO: 88 - protein, 9 aa, synthetic construct
RTFSNNVMG

SEQ ID NO: 89 - protein, 9 aa, synthetic construct
FIFDSYAMG

SEQ ID NO: 90 - protein, 9 aa, synthetic construct
RTFSNYAMG

SEQ ID NO: 91 - skipped

SEQ ID NO: 92 - protein, 9 aa, synthetic construct
FTFSIYAMG

SEQ ID NO: 93 - protein, 9 aa, synthetic construct
STFDSYAMG

SEQ ID NO: 94 - protein, 9 aa, synthetic construct
FIFSTYAMG

SEQ ID NO: 95 - protein, 9 aa, synthetic construct
FTFRNYAMG

SEQ ID NO: 96 - protein, 9 aa, synthetic construct
RIFSIYTMG

SEQ ID NO: 97 - protein, 9 aa, synthetic construct
FTFSSYAMG

SEQ ID NO: 98 - protein, 9 aa, synthetic construct
RTFSNYAMG

SEQ ID NO: 99 - protein, 9 aa, synthetic construct
STFSSYAMG

SEQ ID NO: 100 - protein, 9 aa, synthetic construct
RTLDDYVMG

SEQ ID NO: 101 - protein, 9 aa, synthetic construct
FTFDNYAMG

SEQ ID NO: 102 - protein, 9 aa, synthetic construct
RTFSTNAMG

SEQ ID NO: 103 - protein, 9 aa, synthetic construct
STFSTYAMG

SEQ ID NO: 104 - protein, 9 aa, synthetic construct
RTFDSYAMG

SEQ ID NO: 105 - protein, 9 aa, synthetic construct
FTFDNYAMG

SEQ ID NO: 106 - protein, 9 aa, synthetic construct
FTFSSYAMG

SEQ ID NO: 107 - protein, 9 aa, synthetic construct
STFDIYAMG

SEQ ID NO: 108 - protein, 9 aa, synthetic construct
STLSSYAMG

SEQ ID NO: 109 - protein, 9 aa, synthetic construct
FAFSSYWMG

SEQ ID NO: 110 - protein, 9 aa, synthetic construct
RTFGDYIMG

SEQ ID NO: 111 - protein, 9 aa, synthetic construct
NIFSRYIMG

SEQ ID NO: 112 - protein, 9 aa, synthetic construct
FTFSTHWMG

SEQ ID NO: 113 - protein, 9 aa, synthetic construct
GTFRNYGMG

SEQ ID NO: 114 - protein, 9 aa, synthetic construct
RFSRINSMG

SEQ ID NO: 115 - protein, 9 aa, synthetic construct
IPASIRTMG

SEQ ID NO: 116 - protein, 9 aa, synthetic construct
FTMSSSWMG

SEQ ID NO: 117 - protein, 9 aa, synthetic construct
PISGINRMG

SEQ ID NO: 118 - protein, 9 aa, synthetic construct
RTFSLSDMG

SEQ ID NO: 119 - protein, 9 aa, synthetic construct
SITSIRSMG

SEQ ID NO: 120 - protein, 9 aa, synthetic construct
RTFGDYIMG

SEQ ID NO: 121 - protein, 9 aa, synthetic construct
RTFSNYFMG

SEQ ID NO: 122 - protein, 9 aa, synthetic construct
PTFSIYDMG

SEQ ID NO: 123 - protein, 9 aa, synthetic construct
FTFSGNWMG

SEQ ID NO: 124 - protein, 9 aa, synthetic construct
FPFSEYPMG

SEQ ID NO: 125 - protein, 8 aa, synthetic construct
SIFNIGMG

SEQ ID NO: 126 - protein, 9 aa, synthetic construct
RAFSLRTMG

SEQ ID NO: 127 - protein, 10 aa, synthetic construct
RTFSSYAMMG

SEQ ID NO: 128 - protein, 9 aa, synthetic construct
PTFSIYDMG

SEQ ID NO: 129 - protein, 9 aa, synthetic construct
FTFSTSWMG

SEQ ID NO: 130 - protein, 9 aa, synthetic construct
FTLSGNWMG

SEQ ID NO: 131 - protein, 9 aa, synthetic construct
RAFRRYTMG

SEQ ID NO: 132 - protein, 9 aa, synthetic construct
NIFSRYIMG

SEQ ID NO: 133 - protein, 9 aa, synthetic construct
PTFSIYDMG

SEQ ID NO: 134 - protein, 7 aa, synthetic construct
RTYYAMG

SEQ ID NO: 135 - protein, 9 aa, synthetic construct
FTFSTSWMG

SEQ ID NO: 136 - protein, 9 aa, synthetic construct
RTFESYRMG

SEQ ID NO: 137 - protein, 9 aa, synthetic construct
SSLSFNAMG

SEQ ID NO: 138 - protein, 9 aa, synthetic construct
GTFSGRGMG

SEQ ID NO: 139 - protein, 9 aa, synthetic construct
PTFSWTMMG

SEQ ID NO: 140 - protein, 9 aa, synthetic construct
IIGTIRTMG

SEQ ID NO: 141 - protein, 9 aa, synthetic construct
FTLENNMMG

SEQ ID NO: 142 - protein, 9 aa, synthetic construct
NIFSRYIMG

SEQ ID NO: 143 - protein, 9 aa, synthetic construct
NIDRLYAMG

SEQ ID NO: 144 - protein, 9 aa, synthetic construct
SIASIHAIG

SEQ ID NO: 145 - protein, 9 aa, synthetic construct
RTFSSKAMG

SEQ ID NO: 146 - protein, 9 aa, synthetic construct
SIASFNAMG

SEQ ID NO: 147 - protein, 9 aa, synthetic construct
FTFSTSWMG

SEQ ID NO: 148 - protein, 9 aa, synthetic construct
FTFSGNWMG

SEQ ID NO: 149 - protein, 10 aa, synthetic construct
RTFSSYAMMG

SEQ ID NO: 150 - protein, 9 aa, synthetic construct
ITITTEVMG

SEQ ID NO: 151 - protein, 9 aa, synthetic construct
FTFSTSWMG

SEQ ID NO: 152 - protein, 9 aa, synthetic construct
VTLDLYAMG

SEQ ID NO: 153 - protein, 9 aa, synthetic construct
GTFSGGFMG

SEQ ID NO: 154 - protein, 10 aa, synthetic construct
RTFSTYASMW

SEQ ID NO: 155 - protein, 9 aa, synthetic construct
FTMSSSWMG

SEQ ID NO: 156 - protein, 9 aa, synthetic construct
FPVNRYSMG

SEQ ID NO: 157 - protein, 9 aa, synthetic construct
NIFSRYIMG

SEQ ID NO: 158 - protein, 9 aa, synthetic construct
RSFSNYVMG

SEQ ID NO: 159 - protein, 9 aa, synthetic construct
SIFSISDMG

SEQ ID NO: 160 - protein, 9 aa, synthetic construct
RTFSNYFMG

SEQ ID NO: 161 - protein, 9 aa, synthetic construct
LTFSNYVMG

SEQ ID NO: 162 - protein, 9 aa, synthetic construct
FTFRSFGMG

SEQ ID NO: 163 - protein, 9 aa, synthetic construct
NTFSGGFMG

SEQ ID NO: 164 - protein, 9 aa, synthetic construct
LTISTYPMG

SEQ ID NO: 165 - protein, 9 aa, synthetic construct
PTFSIYDMG

SEQ ID NO: 166 - protein, 9 aa, synthetic construct
FAFGDSWMG

SEQ ID NO: 167 - protein, 9 aa, synthetic construct
FTFDRSWMG

SEQ ID NO: 168 - protein, 9 aa, synthetic construct
RTFGDYIMG

SEQ ID NO: 169 - protein, 9 aa, synthetic construct
FTFSGNWMG

SEQ ID NO: 170 - protein, 9 aa, synthetic construct
FPVNRYWMG

SEQ ID NO: 171 - protein, 9 aa, synthetic construct
RTFGDYIMG

SEQ ID NO: 172 - protein, 9 aa, synthetic construct
FTFSTSWMG

SEQ ID NO: 173 - protein, 9 aa, synthetic construct
STFSINRMG

SEQ ID NO: 174 - protein, 9 aa, synthetic construct
FTFSTSWMG

SEQ ID NO: 175 - protein, 9 aa, synthetic construct
GTLSGNAMG

SEQ ID NO: 176 - protein, 9 aa, synthetic construct
HTFSSYGMG

SEQ ID NO: 177 - protein, 9 aa, synthetic construct
FTFSTSWMG

SEQ ID NO: 178 - protein, 9 aa, synthetic construct
FTFSRYWMG

SEQ ID NO: 179 - protein, 9 aa, synthetic construct
FTFDRSWMG

SEQ ID NO: 180 - protein, 9 aa, synthetic construct
YTFRAYVMG

SEQ ID NO: 181 - protein, 9 aa, synthetic construct
FTFSTYGMG

SEQ ID NO: 182 - protein, 9 aa, synthetic construct
FTFSTSWMG

SEQ ID NO: 183 - protein, 9 aa, synthetic construct
FTMSSSWMG

SEQ ID NO: 184 - protein, 9 aa, synthetic construct
FTFSGNWMG

SEQ ID NO: 185 - protein, 9 aa, synthetic construct
RTFGNYAMG

SEQ ID NO: 186 - protein, 9 aa, synthetic construct
FTFSGNWMG

SEQ ID NO: 187 - protein, 9 aa, synthetic construct
FTLSGNWMG

SEQ ID NO: 188 - protein, 9 aa, synthetic construct
RTFSTHAMG

SEQ ID NO: 189 - protein, 9 aa, synthetic construct
FTFSNSGMG

SEQ ID NO: 190 - protein, 6 aa, synthetic construct
RTFSMG

SEQ ID NO: 191 - protein, 9 aa, synthetic construct
NIFSRYIMG

SEQ ID NO: 192 - protein, 9 aa, synthetic construct
FTFDRSWMG

SEQ ID NO: 193 - protein, 9 aa, synthetic construct
FTFGHYAMG

SEQ ID NO: 194 - protein, 9 aa, synthetic construct
RTFSSYHMG

SEQ ID NO: 195 - protein, 5 aa, synthetic construct
RSRMG

SEQ ID NO: 196 - protein, 6 aa, synthetic construct
RTYNMG

SEQ ID NO: 197 - protein, 9 aa, synthetic construct
FTLSGNWMG

SEQ ID NO: 198 - protein, 9 aa, synthetic construct
FTFSTSWMG

SEQ ID NO: 199 - protein, 9 aa, synthetic construct
FTFSTSWMG

SEQ ID NO: 200 - protein, 7 aa, synthetic construct
RSRYGMG

SEQ ID NO: 201 - protein, 9 aa, synthetic construct
FTFSTSWMG

SEQ ID NO: 202 - protein, 9 aa, synthetic construct
FTFDRSWMG

SEQ ID NO: 203 - protein, 9 aa, synthetic construct
SIFSINSMG

SEQ ID NO: 204 - protein, 9 aa, synthetic construct
FTFDRSWMG

SEQ ID NO: 205 - protein, 9 aa, synthetic construct
FTFSTSWMG

SEQ ID NO: 206 - protein, 9 aa, synthetic construct
STLRDYVMG

SEQ ID NO: 207 - protein, 9 aa, synthetic construct
GTLSSYIMG

SEQ ID NO: 208 - protein, 9 aa, synthetic construct
FTFSTHWMG

SEQ ID NO: 209 - protein, 9 aa, synthetic construct
GTFSAFPMG

SEQ ID NO: 210 - protein, 9 aa, synthetic construct
FTFSGNWMG

SEQ ID NO: 211 - protein, 9 aa, synthetic construct
FTFSGNWMG

SEQ ID NO: 212 - protein, 9 aa, synthetic construct
FTFDRSWMG

SEQ ID NO: 213 - protein, 9 aa, synthetic construct
FTFSGNWMG

SEQ ID NO: 214 - protein, 9 aa, synthetic construct
FTLSSNWMG

SEQ ID NO: 215 - protein, 9 aa, synthetic construct
FDFSVSWMG

SEQ ID NO: 216 - protein, 9 aa, synthetic construct
FTMSSSWMG

SEQ ID NO: 217 - protein, 9 aa, synthetic construct
RNFRRNSMG

SEQ ID NO: 218 - protein, 9 aa, synthetic construct
FTFDRSWMG

SEQ ID NO: 219 - protein, 9 aa, synthetic construct
LTISTYNMG

SEQ ID NO: 220 - protein, 9 aa, synthetic construct
FTFSTSWMG

SEQ ID NO: 221 - protein, 9 aa, synthetic construct
RTFGDYIMG

SEQ ID NO: 222 - protein, 9 aa, synthetic construct
RIFRRNSMG

SEQ ID NO: 223 - protein, 9 aa, synthetic construct
FTFGNYGVA

SEQ ID NO: 224 - protein, 9 aa, synthetic construct
FTFDKYRMM

SEQ ID NO: 225 - protein, 9 aa, synthetic construct
FTFPSYTMG

SEQ ID NO: 226 - protein, 9 aa, synthetic construct
FTFSNYGVS

SEQ ID NO: 227 - protein, 9 aa, synthetic construct
FTFNNFSMT

SEQ ID NO: 228 - protein, 9 aa, synthetic construct
FTFSAYGMN

SEQ ID NO: 229 - protein, 9 aa, synthetic construct
FTFSDYTMN

SEQ ID NO: 230 - protein, 9 aa, synthetic construct
FTFNNYGMS

SEQ ID NO: 231 - protein, 9 aa, synthetic construct
FTFNKYPMM

SEQ ID NO: 232 - protein, 9 aa, synthetic construct
FTFNSYAMS

SEQ ID NO: 233 - protein, 9 aa, synthetic construct
FTFGNYKMT

SEQ ID NO: 234 - protein, 9 aa, synthetic construct
FTFTNYGVS

SEQ ID NO: 235 - protein, 9 aa, synthetic construct
FTFNKYPMM

SEQ ID NO: 236 - protein, 9 aa, synthetic construct
FTFADEGMM

SEQ ID NO: 237 - protein, 9 aa, synthetic construct
FTFSSAAMS

SEQ ID NO: 238 - protein, 9 aa, synthetic construct
FTFDRYRMM

SEQ ID NO: 239 - protein, 9 aa, synthetic construct
FTFAEYSMN

SEQ ID NO: 240 - protein, 9 aa, synthetic construct
FTFGTIPMS

SEQ ID NO: 241 - protein, 9 aa, synthetic construct
FTFLYYRMA

SEQ ID NO: 242 - protein, 9 aa, synthetic construct
FTFTNYGVS

SEQ ID NO: 243 - protein, 9 aa, synthetic construct
FTFSNYGVS

SEQ ID NO: 244 - protein, 9 aa, synthetic construct
FTFEGYPMS

SEQ ID NO: 245 - protein, 9 aa, synthetic construct
FTFSRYFMG

SEQ ID NO: 246 - protein, 9 aa, synthetic construct
FTFNNYGVS

SEQ ID NO: 247 - protein, 9 aa, synthetic construct
FTFGTIPMS

SEQ ID NO: 248 - protein, 9 aa, synthetic construct
FTFGNYRMT

SEQ ID NO: 249 - protein, 9 aa, synthetic construct
FTFVWYGMG

SEQ ID NO: 250 - protein, 9 aa, synthetic construct
FTFSTYAMS

SEQ ID NO: 251 - protein, 9 aa, synthetic construct
FTFSYYRMY

SEQ ID NO: 252 - protein, 9 aa, synthetic construct
FTFKSYGMH

SEQ ID NO: 253 - protein, 9 aa, synthetic construct
FTFVAYNMG

SEQ ID NO: 254 - protein, 9 aa, synthetic construct
FTFEQYDMR

SEQ ID NO: 255 - protein, 9 aa, synthetic construct
FTFNKYPMM

SEQ ID NO: 256 - protein, 9 aa, synthetic construct
FTFSVYSMN

SEQ ID NO: 257 - protein, 9 aa, synthetic construct
FTFNAYPMT

SEQ ID NO: 258 - protein, 9 aa, synthetic construct
FTFSNYGMT

SEQ ID NO: 259 - protein, 9 aa, synthetic construct
FTFPVYNMA

SEQ ID NO: 260 - protein, 9 aa, synthetic construct
FTFSPYLVS

SEQ ID NO: 261 - protein, 9 aa, synthetic construct
FTFKSYVMG

SEQ ID NO: 262 - protein, 9 aa, synthetic construct
FTFSRYAMN

SEQ ID NO: 263 - protein, 9 aa, synthetic construct
FTFNKYPMM

SEQ ID NO: 264 - protein, 9 aa, synthetic construct
FTFNHYGMG

SEQ ID NO: 265 - protein, 9 aa, synthetic construct
FTFYDYTMD

SEQ ID NO: 266 - protein, 9 aa, synthetic construct
FTFGNYAMA

SEQ ID NO: 267 - protein, 9 aa, synthetic construct
FTFRRYVMG

SEQ ID NO: 268 - protein, 9 aa, synthetic construct
FTFSSYFMS

SEQ ID NO: 269 - protein, 9 aa, synthetic construct
FMFSWYDMG

SEQ ID NO: 270 - protein, 9 aa, synthetic construct
FTFTNYGMS

SEQ ID NO: 271 - protein, 9 aa, synthetic construct
FTFPNYGMS

SEQ ID NO: 272 - protein, 9 aa, synthetic construct
FTFPNYGMA

SEQ ID NO: 273 - protein, 9 aa, synthetic construct
FTFHKYGMA

SEQ ID NO: 274 - protein, 9 aa, synthetic construct
FTFSRYHMG

SEQ ID NO: 275 - protein, 9 aa, synthetic construct
STFTEYRMW

SEQ ID NO: 276 - protein, 9 aa, synthetic construct
FTFEDTEMD

SEQ ID NO: 277 - protein, 9 aa, synthetic construct
FTFGSSAMS

SEQ ID NO: 278 - protein, 9 aa, synthetic construct
FTFSTAAMT

SEQ ID NO: 279 - protein, 9 aa, synthetic construct
LTFPNYGMG

SEQ ID NO: 280 - protein, 9 aa, synthetic construct
FTFLWYDMG

SEQ ID NO: 281 - protein, 9 aa, synthetic construct
FTFSPYLMA

SEQ ID NO: 282 - protein, 9 aa, synthetic construct
FTFSDYTMN

SEQ ID NO: 283 - protein, 9 aa, synthetic construct
FTFSNYGVS

SEQ ID NO: 284 - protein, 9 aa, synthetic construct
FTFYKYLMS

SEQ ID NO: 285 - protein, 9 aa, synthetic construct
FTFSAYPMY

SEQ ID NO: 286 - protein, 9 aa, synthetic construct
FTLADYTMN

SEQ ID NO: 287 - protein, 9 aa, synthetic construct
FTFSYYGMY

SEQ ID NO: 288 - protein, 9 aa, synthetic construct
FTFVWYDMG

SEQ ID NO: 289 - protein, 9 aa, synthetic construct
FTFNKYPMM

SEQ ID NO: 290 - protein, 9 aa, synthetic construct
FTFSSASMS

SEQ ID NO: 291 - protein, 9 aa, synthetic construct
FTFGNYRMT

SEQ ID NO: 292 - protein, 9 aa, synthetic construct
FTFSSYFMS

SEQ ID NO: 293 - protein, 9 aa, synthetic construct
FTFSTAAMS

SEQ ID NO: 294 - protein, 9 aa, synthetic construct
FTFRSYTMG

SEQ ID NO: 295 - protein, 9 aa, synthetic construct
FTFGTYYMG

SEQ ID NO: 296 - protein, 9 aa, synthetic construct
FTFSSYVMI

SEQ ID NO: 297 - protein, 9 aa, synthetic construct
FTFGTIPMS

SEQ ID NO: 298 - protein, 9 aa, synthetic construct
FTFSYYRVY

SEQ ID NO: 299 - protein, 9 aa, synthetic construct
FTFGNYAMA

SEQ ID NO: 300 - protein, 9 aa, synthetic construct
FTFTNYGVS

SEQ ID NO: 301 - protein, 9 aa, synthetic construct
FTFSNYGVS

SEQ ID NO: 302 - protein, 9 aa, synthetic construct
FAFAAYDMG

SEQ ID NO: 303 - protein, 9 aa, synthetic construct
FTLSSYPMS

SEQ ID NO: 304 - protein, 9 aa, synthetic construct
FTFTYYRMD

SEQ ID NO: 305 - protein, 9 aa, synthetic construct
FTFADEGMM

SEQ ID NO: 306 - protein, 9 aa, synthetic construct
FTFKDYGVN

SEQ ID NO: 307 - protein, 9 aa, synthetic construct
FTFSRYAMT

SEQ ID NO: 308 - protein, 9 aa, synthetic construct
FTFSSYFMS

SEQ ID NO: 309 - protein, 9 aa, synthetic construct
FTFNKYPMM

SEQ ID NO: 310 - protein, 9 aa, synthetic construct
FTFSNYGMS

SEQ ID NO: 311 - protein, 9 aa, synthetic construct
FTFSNYGVS

SEQ ID NO: 312 - protein, 9 aa, synthetic construct
FIFSSAAMS

SEQ ID NO: 313 - protein, 9 aa, synthetic construct
FTFSYYRMY

SEQ ID NO: 314 - protein, 9 aa, synthetic construct
FTFSRYFMG

SEQ ID NO: 315 - protein, 9 aa, synthetic construct
FTFSRYFMG

SEQ ID NO: 316 - protein, 9 aa, synthetic construct
FTFSYYRMY

SEQ ID NO: 317 - protein, 9 aa, synthetic construct
FTFPKYGMA

SEQ ID NO: 318 - protein, 9 aa, synthetic construct
FTFKDYGMN

SEQ ID NO: 319 - protein, 9 aa, synthetic construct
FTFNAYPMT

SEQ ID NO: 320 - protein, 9 aa, synthetic construct
FTFETYAMS

SEQ ID NO: 321 - protein, 9 aa, synthetic construct
FTFSPYPMM

SEQ ID NO: 322 - protein, 9 aa, synthetic construct
FTFSTYPVS

SEQ ID NO: 323 - protein, 9 aa, synthetic construct
FTFGNYAMS

SEQ ID NO: 324 - protein, 9 aa, synthetic construct
FTFTYYRMY

SEQ ID NO: 325 - protein, 9 aa, synthetic construct
FTFTSYDMG

SEQ ID NO: 326 - protein, 9 aa, synthetic construct
FTFSPRRMS

SEQ ID NO: 327 - protein, 9 aa, synthetic construct
FTFGNYRMT

SEQ ID NO: 328 - protein, 9 aa, synthetic construct
FTFGNYGMT

SEQ ID NO: 329 - protein, 9 aa, synthetic construct
FTFSPYPMM

SEQ ID NO: 330 - protein, 9 aa, synthetic construct
FTFSSYFVT

SEQ ID NO: 331 - protein, 9 aa, synthetic construct
FTFSDYTMN

SEQ ID NO: 332 - protein, 9 aa, synthetic construct
FTFFPYAMG

SEQ ID NO: 333 - protein, 9 aa, synthetic construct
FTFVWYDMG

SEQ ID NO: 334 - protein, 9 aa, synthetic construct
FTFSSYFMT

SEQ ID NO: 335 - protein, 9 aa, synthetic construct
LIFAWYDMG

SEQ ID NO: 336 - protein, 9 aa, synthetic construct
FTFEGYPMS

SEQ ID NO: 337 - protein, 9 aa, synthetic construct
FTFSNYGVS

SEQ ID NO: 338 - protein, 9 aa, synthetic construct
FTFSRYFMG

SEQ ID NO: 339 - protein, 9 aa, synthetic construct
GIFSSYAIS

SEQ ID NO: 340 - protein, 9 aa, synthetic construct
GTYTTHGIS

SEQ ID NO: 341 - protein, 9 aa, synthetic construct
FSFGSYAMS

SEQ ID NO: 342 - protein, 9 aa, synthetic construct
GPFNKYAIS

SEQ ID NO: 343 - protein, 9 aa, synthetic construct
FTFSTYLMI

SEQ ID NO: 344 - protein, 9 aa, synthetic construct
FTLSSYSMS

SEQ ID NO: 345 - protein, 9 aa, synthetic construct
FTFGNYAMS

SEQ ID NO: 346 - protein, 9 aa, synthetic construct
FTFGTYSMS

SEQ ID NO: 347 - protein, 9 aa, synthetic construct
FSFSNHAMS

SEQ ID NO: 348 - protein, 9 aa, synthetic construct
FSFSSSGMS

SEQ ID NO: 349 - protein, 9 aa, synthetic construct
GTFRRHAIS

SEQ ID NO: 350 - protein, 9 aa, synthetic construct
GTYTTHGIS

SEQ ID NO: 351 - protein, 9 aa, synthetic construct
FTFSNYAMS

SEQ ID NO: 352 - protein, 9 aa, synthetic construct
FTFSNYAMS

SEQ ID NO: 353 - protein, 9 aa, synthetic construct
GTFNIYAIS

SEQ ID NO: 354 - protein, 9 aa, synthetic construct
GTFSRYGIS

SEQ ID NO: 355 - protein, 9 aa, synthetic construct
GTFTNHAIS

SEQ ID NO: 356 - protein, 9 aa, synthetic construct
FTFASYAMS

SEQ ID NO: 357 - protein, 9 aa, synthetic construct
GTFTYYPIS

SEQ ID NO: 358 - protein, 9 aa, synthetic construct
GTYTTHGIS

SEQ ID NO: 359 - protein, 9 aa, synthetic construct
GTFSQYAIS

SEQ ID NO: 360 - protein, 13 aa, synthetic construct
AAITWSGTRTDYA

SEQ ID NO: 361 - protein, 13 aa, synthetic construct
STISWSGGRTYYA

SEQ ID NO: 362 - protein, 13 aa, synthetic construct
AAITWSGTRTDYA

SEQ ID NO: 363 - protein, 13 aa, synthetic construct
STISSDGDSTYYA

SEQ ID NO: 364 - protein, 13 aa, synthetic construct
ATISSSGDRTYYA

SEQ ID NO: 365 - protein, 13 aa, synthetic construct
ATINSSGSRTYYA

SEQ ID NO: 366 - protein, 13 aa, synthetic construct
ATISRGGTRTNYA

SEQ ID NO: 367 - protein, 13 aa, synthetic construct
ATISGGGDTTYYA

SEQ ID NO: 368 - protein, 13 aa, synthetic construct
SSITWSGGRTSYA

SEQ ID NO: 369 - protein, 13 aa, synthetic construct
SGISGSGGRTSYA

SEQ ID NO: 370 - protein, 13 aa, synthetic construct
ASITWGGGRTYYA

SEQ ID NO: 371 - protein, 13 aa, synthetic construct
AAITWSGTRTNYA

SEQ ID NO: 372 - protein, 13 aa, synthetic construct
AAITWSGGRTYYA

SEQ ID NO: 373 - protein, 13 aa, synthetic construct
SAISWSGTNTNYA

SEQ ID NO: 374 - protein, 13 aa, synthetic construct
ATISGSGGRTYYA

SEQ ID NO: 375 - protein, 13 aa, synthetic construct
ATISWGGNSTYYA

SEQ ID NO: 376 - protein, 13 aa, synthetic construct
ATISSGGGSTYYA

SEQ ID NO: 377 - protein, 13 aa, synthetic construct
SAINSSGSRTYYA

SEQ ID NO: 378 - protein, 13 aa, synthetic construct
ATISGSFGRTYYA

SEQ ID NO: 379 - protein, 13 aa, synthetic construct
ASISWSGDTTNYA

SEQ ID NO: 380 - protein, 13 aa, synthetic construct
SAITWSSSRTYYA

SEQ ID NO: 381 - protein, 13 aa, synthetic construct
STISRSSTRTYYA

SEQ ID NO: 382 - protein, 13 aa, synthetic construct
ASISSGDTNTNYA

SEQ ID NO: 383 - protein, 13 aa, synthetic construct
SAISTGDGSTNYA

SEQ ID NO: 384 - protein, 13 aa, synthetic construct
AAITWSGGRTYYA

SEQ ID NO: 385 - protein, 13 aa, synthetic construct
ATITWSGTRTNYA

SEQ ID NO: 386 - protein, 13 aa, synthetic construct
AAISWGGASTNYA

SEQ ID NO: 387 - protein, 13 aa, synthetic construct
AAISWGGSNTNYA

SEQ ID NO: 388 - protein, 13 aa, synthetic construct
AAITWSGTRTDYA

SEQ ID NO: 389 - protein, 13 aa, synthetic construct
AAITWSGTRTDYA

SEQ ID NO: 390 - protein, 13 aa, synthetic construct
STISWSGGNTYYA

SEQ ID NO: 391 - protein, 13 aa, synthetic construct
AAITTSGSSTYYA

SEQ ID NO: 392 - protein, 13 aa, synthetic construct
SAITRSGITTYYA

SEQ ID NO: 393 - protein, 13 aa, synthetic construct
SSISSSSSRTSYA

SEQ ID NO: 394 - protein, 13 aa, synthetic construct
ATINSSGSRTYYA

SEQ ID NO: 395 - protein, 13 aa, synthetic construct
ASITWSGTSTNYA

SEQ ID NO: 396 - protein, 13 aa, synthetic construct
AGISWSGTRTYYA

SEQ ID NO: 397 - protein, 13 aa, synthetic construct
SAISRNGASTSYA

SEQ ID NO: 398 - protein, 13 aa, synthetic construct
ATISGGGDTTYYA

SEQ ID NO: 399 - protein, 13 aa, synthetic construct
ATITWSGTRTNYA

SEQ ID NO: 400 - protein, 13 aa, synthetic construct
TAITTSGGNTYYA

SEQ ID NO: 401 - protein, 13 aa, synthetic construct
ATISTSSSRTYYA

SEQ ID NO: 402 - protein, 13 aa, synthetic construct
SAISWSGSSTYYA

SEQ ID NO: 403 - protein, 13 aa, synthetic construct
ATITWSGTTTNYA

SEQ ID NO: 404 - protein, 13 aa, synthetic construct
ASITWSGTRTDYA

SEQ ID NO: 405 - protein, 13 aa, synthetic construct
ASISSGDTNTYYA

SEQ ID NO: 406 - protein, 13 aa, synthetic construct
AAITGSGGRTYYA

SEQ ID NO: 407 - protein, 12 aa, synthetic construct
AARNSGGNTNYA

SEQ ID NO: 408 - protein, 12 aa, synthetic construct
ATISGGGSTNYA

SEQ ID NO: 409 - protein, 12 aa, synthetic construct
AGISNGGTTKYA

SEQ ID NO: 410 - protein, 12 aa, synthetic construct
AARNSGGNTNYA

SEQ ID NO: 411 - protein, 13 aa, synthetic construct
AAISWSGVSTIYA

SEQ ID NO: 412 - protein, 15 aa, synthetic construct
AHIFRSGITSYASYA

SEQ ID NO: 413 - protein, 13 aa, synthetic construct
SLITSDDGSTYYA

SEQ ID NO: 414 - protein, 12 aa, synthetic construct
ATLTSGGSTNYA

SEQ ID NO: 415 - protein, 13 aa, synthetic construct
STITFNGDHTYYA

SEQ ID NO: 416 - protein, 13 aa, synthetic construct
GAINWLSESTYYA

SEQ ID NO: 417 - protein, 13 aa, synthetic construct
SSVYIFGGSTYYA

SEQ ID NO: 418 - protein, 12 aa, synthetic construct
ASVSGGGNSDYA

SEQ ID NO: 419 - protein, 13 aa, synthetic construct
AAINWDSARTYYA

SEQ ID NO: 420 - protein, 13 aa, synthetic construct
AAITWNSGRTNYA

SEQ ID NO: 421 - protein, 13 aa, synthetic construct
SGISSGGGRTYYA

SEQ ID NO: 422 - protein, 13 aa, synthetic construct
AVVNWNGDSTYYA

SEQ ID NO: 423 - protein, 12 aa, synthetic construct
SSIYSNGHTYYA

SEQ ID NO: 424 - protein, 13 aa, synthetic construct
SLITSDDGSTYYA

SEQ ID NO: 425 - protein, 12 aa, synthetic construct
AIITDGSKTLYA

SEQ ID NO: 426 - protein, 13 aa, synthetic construct
AVINWSRGSTFYA

SEQ ID NO: 427 - protein, 12 aa, synthetic construct
ATINSGGGTNYA

SEQ ID NO: 428 - protein, 13 aa, synthetic construct
ASISSSGVSKHYA

SEQ ID NO: 429 - protein, 13 aa, synthetic construct
AAIRWSGGTTFYA

SEQ ID NO: 430 - protein, 12 aa, synthetic construct
AGISNGGTTKYA

SEQ ID NO: 431 - protein, 13 aa, synthetic construct
ASTIWSRGDTYYA

SEQ ID NO: 432 - protein, 12 aa, synthetic construct
AIITDGSKTLYA

SEQ ID NO: 433 - protein, 12 aa, synthetic construct
AGILSDGRELYA

SEQ ID NO: 434 - protein, 12 aa, synthetic construct
GGINWSGRTYYA

SEQ ID NO: 435 - protein, 13 aa, synthetic construct
SSVYIFGGSTYYA

SEQ ID NO: 436 - protein, 13 aa, synthetic construct
SSVYIFGGSTYYA

SEQ ID NO: 437 - protein, 12 aa, synthetic construct
AIITDGSKTLYA

SEQ ID NO: 438 - protein, 13 aa, synthetic construct
SLITSDDGSTYYA

SEQ ID NO: 439 - protein, 13 aa, synthetic construct
SAIGWSGASTYYA

SEQ ID NO: 440 - protein, 12 aa, synthetic construct
AGISSGGTTKYA

SEQ ID NO: 441 - protein, 13 aa, synthetic construct
SLITSDDGSTYYA

SEQ ID NO: 442 - protein, 13 aa, synthetic construct
SSVYIFGGSTYYA

SEQ ID NO: 443 - protein, 13 aa, synthetic construct
SSVYIFGGSTYYA

SEQ ID NO: 444 - protein, 13 aa, synthetic construct
SSVYIFGGSTYYA

SEQ ID NO: 445 - protein, 12 aa, synthetic construct
VGISSGGSTHYA

SEQ ID NO: 446 - protein, 12 aa, synthetic construct
VGISSGGSTHYA

SEQ ID NO: 447 - protein, 12 aa, synthetic construct
AIITDGSKTLYA

SEQ ID NO: 448 - protein, 13 aa, synthetic construct
AAIHWNGDSTAYA

SEQ ID NO: 449 - protein, 12 aa, synthetic construct
AARNSGGNTNYA

SEQ ID NO: 450 - protein, 13 aa, synthetic construct
AGIWRSGGSTVYA

SEQ ID NO: 451 - protein, 12 aa, synthetic construct
ASVLRGGYTWYA

SEQ ID NO: 452 - protein, 12 aa, synthetic construct
AIITDGSKTLYA

SEQ ID NO: 453 - protein, 12 aa, synthetic construct
VGISSGGSTHYA

SEQ ID NO: 454 - protein, 13 aa, synthetic construct
SAIGWSGASTYYA

SEQ ID NO: 455 - protein, 12 aa, synthetic construct
AGISNGGTTKYA

SEQ ID NO: 456 - protein, 12 aa, synthetic construct
ATITSGGLTVYA

SEQ ID NO: 457 - protein, 13 aa, synthetic construct
GAINWLSESTYYA

SEQ ID NO: 458 - protein, 13 aa, synthetic construct
ATVTWRDNITYYA

SEQ ID NO: 459 - protein, 13 aa, synthetic construct
AAINWDSARTYYA

SEQ ID NO: 460 - protein, 13 aa, synthetic construct
ASTIWSRGDTYYA

SEQ ID NO: 461 - protein, 12 aa, synthetic construct
ASVLRGGYTWYA

SEQ ID NO: 462 - protein, 13 aa, synthetic construct
AAVNWSGRRELYA

SEQ ID NO: 463 - protein, 13 aa, synthetic construct
AAVNWSGRRELYA

SEQ ID NO: 464 - protein, 13 aa, synthetic construct
SGISSGGGRTYYA

SEQ ID NO: 465 - protein, 12 aa, synthetic construct
ASITSGGSTYYA

SEQ ID NO: 466 - protein, 12 aa, synthetic construct
AEITRSGRTNYA

SEQ ID NO: 467 - protein, 13 aa, synthetic construct
ASISSSGISTYYA

SEQ ID NO: 468 - protein, 12 aa, synthetic construct
ATITSGGSTNYA

SEQ ID NO: 469 - protein, 12 aa, synthetic construct
ATISRGGGSTYV

SEQ ID NO: 470 - protein, 12 aa, synthetic construct
ASITSGGSTYYA

SEQ ID NO: 471 - protein, 17 aa, synthetic construct
ATIVHSGGHSGGTSYYA

SEQ ID NO: 472 - protein, 12 aa, synthetic construct
AARNSGGNTNYA

SEQ ID NO: 473 - protein, 13 aa, synthetic construct
ASIYWSSGNTYYA

SEQ ID NO: 474 - protein, 13 aa, synthetic construct
AAISWSGISTIYA

SEQ ID NO: 475 - protein, 12 aa, synthetic construct
ASISTSGNTFYA

SEQ ID NO: 476 - protein, 12 aa, synthetic construct
ASITSGGSTYYA

SEQ ID NO: 477 - protein, 12 aa, synthetic construct
ASITSGGTTNYA

SEQ ID NO: 478 - protein, 13 aa, synthetic construct
AVINYRGSSLKYA

SEQ ID NO: 479 - protein, 13 aa, synthetic construct
AAISWSGVSKHYA

SEQ ID NO: 480 - protein, 12 aa, synthetic construct
VSVTSGGYTNYA

SEQ ID NO: 481 - protein, 12 aa, synthetic construct
ASINSGGTRNYA

SEQ ID NO: 482 - protein, 12 aa, synthetic construct
ASISSGSAINYA

SEQ ID NO: 483 - protein, 13 aa, synthetic construct
ADIRSSAGRTYYA

SEQ ID NO: 484 - protein, 12 aa, synthetic construct
AGILSDGRELYA

SEQ ID NO: 485 - protein, 13 aa, synthetic construct
ASISSSGISTYYA

SEQ ID NO: 486 - protein, 16 aa, synthetic construct
AAITPINWGGRGTHYA

SEQ ID NO: 487 - protein, 13 aa, synthetic construct
ASIYWSSGNTYYA

SEQ ID NO: 488 - protein, 13 aa, synthetic construct
ATVRWGTSSTYYA

SEQ ID NO: 489 - protein, 12 aa, synthetic construct
AGISNGGTTKYA

SEQ ID NO: 490 - protein, 12 aa, synthetic construct
AAITSGGSTYYA

SEQ ID NO: 491 - protein, 13 aa, synthetic construct
AAISWSGVSTYYA

SEQ ID NO: 492 - protein, 12 aa, synthetic construct
ALISRVGVTSYA

SEQ ID NO: 493 - protein, 12 aa, synthetic construct
ATISWSGSAVYA

SEQ ID NO: 494 - protein, 15 aa, synthetic construct
ATIYSRSGGSTTYYA

SEQ ID NO: 495 - protein, 12 aa, synthetic construct
ASISSGGGTNYA

SEQ ID NO: 496 - protein, 12 aa, synthetic construct
AAMTSGGGTNYA

SEQ ID NO: 497 - protein, 12 aa, synthetic construct
ASITSGGSTNYA

SEQ ID NO: 498 - protein, 13 aa, synthetic construct
SAISWSGISTYYA

SEQ ID NO: 499 - protein, 12 aa, synthetic construct
ASITSGGTTNYA

SEQ ID NO: 500 - protein, 12 aa, synthetic construct
ASVTSGGTTNYA

SEQ ID NO: 501 - protein, 13 aa, synthetic construct
AALSWIIGSTYYA

SEQ ID NO: 502 - protein, 12 aa, synthetic construct
ASITSGGSTSYA

SEQ ID NO: 503 - protein, 12 aa, synthetic construct
AGVNSNGYINYA

SEQ ID NO: 504 - protein, 12 aa, synthetic construct
SSISRSGTTMFA

SEQ ID NO: 505 - protein, 14 aa, synthetic construct
AAISGWSGGTTNYA

SEQ ID NO: 506 - protein, 12 aa, synthetic construct
ASIGSSGTTRYA

SEQ ID NO: 507 - protein, 12 aa, synthetic construct
AAISSGGTTYYA

SEQ ID NO: 508 - protein, 12 aa, synthetic construct
ASISSGGTTNYA

SEQ ID NO: 509 - protein, 12 aa, synthetic construct
AGVNSNGYINYA

SEQ ID NO: 510 - protein, 12 aa, synthetic construct
ASITSGGTTSYA

SEQ ID NO: 511 - protein, 12 aa, synthetic construct
VGISSGGTPHYA

SEQ ID NO: 512 - protein, 12 aa, synthetic construct
AGVNSNGYINYA

SEQ ID NO: 513 - protein, 13 aa, synthetic construct
ARISSGGELPYYA

SEQ ID NO: 514 - protein, 12 aa, synthetic construct
GGISSGGSTYYA

SEQ ID NO: 515 - protein, 15 aa, synthetic construct
AVITRSGGGEVTTYA

SEQ ID NO: 516 - protein, 12 aa, synthetic construct
AGITSSGIPNYA

SEQ ID NO: 517 - protein, 13 aa, synthetic construct
SAIGWSGASTYYA

SEQ ID NO: 518 - protein, 12 aa, synthetic construct
AAVTSGGNTNYA

SEQ ID NO: 519 - protein, 12 aa, synthetic construct
AEITRVGNTNYA

SEQ ID NO: 520 - protein, 15 aa, synthetic construct
AVITRSGGGEVTTYA

SEQ ID NO: 521 - protein, 13 aa, synthetic construct
SYICRAGGPTYYA

SEQ ID NO: 522 - protein, 12 aa, synthetic construct
GVIWGGGGTYYA

SEQ ID NO: 523 - protein, 13 aa, synthetic construct
STIWPRGHKTYYA

SEQ ID NO: 524 - protein, 12 aa, synthetic construct
SGISSGGDTYYV

SEQ ID NO: 525 - protein, 13 aa, synthetic construct
SSISPSGGWTEYA

SEQ ID NO: 526 - protein, 13 aa, synthetic construct
SGISPNGGITTYA

SEQ ID NO: 527 - protein, 13 aa, synthetic construct
SSIDWHGGVTYYA

SEQ ID NO: 528 - protein, 12 aa, synthetic construct
TGISSGGDTYYV

SEQ ID NO: 529 - protein, 12 aa, synthetic construct
SGITRSGSTNYR

SEQ ID NO: 530 - protein, 13 aa, synthetic construct
SGIVSSGGLTGYA

SEQ ID NO: 531 - protein, 13 aa, synthetic construct
SQISQTGRITYYA

SEQ ID NO: 532 - protein, 12 aa, synthetic construct
SGISSGGDTYYV

SEQ ID NO: 533 - protein, 13 aa, synthetic construct
SYISSSGSSTYYA

SEQ ID NO: 534 - protein, 13 aa, synthetic construct
SSIGRHGGRTYYA

SEQ ID NO: 535 - protein, 13 aa, synthetic construct
SGISPSGGITTYA

SEQ ID NO: 536 - protein, 13 aa, synthetic construct
SAISGSGDKTYYA

SEQ ID NO: 537 - protein, 13 aa, synthetic construct
SWISPHGALTYYA

SEQ ID NO: 538 - protein, 12 aa, synthetic construct
GVIWGGGGTYYA

SEQ ID NO: 539 - protein, 13 aa, synthetic construct
TAISRSGDKTYYA

SEQ ID NO: 540 - protein, 13 aa, synthetic construct
GYINPSGGYTYYA

SEQ ID NO: 541 - protein, 13 aa, synthetic construct
GYINPSRGYTYYA

SEQ ID NO: 542 - protein, 13 aa, synthetic construct
SSISGYGSTTYYA

SEQ ID NO: 543 - protein, 13 aa, synthetic construct
SSISSTGFKTYYA

SEQ ID NO: 544 - protein, 13 aa, synthetic construct
TWISPHGALTYYA

SEQ ID NO: 545 - protein, 13 aa, synthetic construct
SVIHQSGTPTYYA

SEQ ID NO: 546 - protein, 13 aa, synthetic construct
SQISETGRRTYYA

SEQ ID NO: 547 - protein, 13 aa, synthetic construct
SAISGRGDNSYYA

SEQ ID NO: 548 - protein, 13 aa, synthetic construct
SEISPSGGYTYYA

SEQ ID NO: 549 - protein, 13 aa, synthetic construct
SGISPSGGITTYA

SEQ ID NO: 550 - protein, 13 aa, synthetic construct
SAISGSGGGTSYA

SEQ ID NO: 551 - protein, 13 aa, synthetic construct
SAISREGRATYYA

SEQ ID NO: 552 - protein, 13 aa, synthetic construct
SYITPKGDHTYYA

SEQ ID NO: 553 - protein, 13 aa, synthetic construct
SAISGSGGGTSYA

SEQ ID NO: 554 - protein, 13 aa, synthetic construct
SGISPSGGITTYA

SEQ ID NO: 555 - protein, 13 aa, synthetic construct
SAITGSGGSTYYA

SEQ ID NO: 556 - protein, 12 aa, synthetic construct
GVIWGGGGTYYA

SEQ ID NO: 557 - protein, 13 aa, synthetic construct
SSISGYGSTTYYA

SEQ ID NO: 558 - protein, 13 aa, synthetic construct
SSISDHGFNTYYA

SEQ ID NO: 559 - protein, 13 aa, synthetic construct
SAINGSGGGTYYA

SEQ ID NO: 560 - protein, 13 aa, synthetic construct
SEISPSGKKKYYA

SEQ ID NO: 561 - protein, 13 aa, synthetic construct
SSIVSSGGLTLYA

SEQ ID NO: 562 - protein, 13 aa, synthetic construct
SYISSSGSSTYYA

SEQ ID NO: 563 - protein, 13 aa, synthetic construct
SAISGSGGGTSYA

SEQ ID NO: 564 - protein, 13 aa, synthetic construct
SSIGRHGGRTYYA

SEQ ID NO: 565 - protein, 13 aa, synthetic construct
SEISPSGGYTYYA

SEQ ID NO: 566 - protein, 13 aa, synthetic construct
TTIGPNGTTTYYA

SEQ ID NO: 567 - protein, 13 aa, synthetic construct
SQISNTGDRRYYA

SEQ ID NO: 568 - protein, 13 aa, synthetic construct
CGIYPNGGSTYYA

SEQ ID NO: 569 - protein, 13 aa, synthetic construct
GYINPTGGYTYYA

SEQ ID NO: 570 - protein, 13 aa, synthetic construct
SGIYPSGGSTLYA

SEQ ID NO: 571 - protein, 13 aa, synthetic construct
STISSGGGYTYYP

SEQ ID NO: 572 - protein, 13 aa, synthetic construct
STISPYGPVTYYA

SEQ ID NO: 573 - protein, 13 aa, synthetic construct
SGISPSGGITTYA

SEQ ID NO: 574 - protein, 13 aa, synthetic construct
SKIGPHGRLTYYA

SEQ ID NO: 575 - protein, 13 aa, synthetic construct
SAISGGGSNKYYA

SEQ ID NO: 576 - protein, 13 aa, synthetic construct
SGISPTGGITTYA

SEQ ID NO: 577 - protein, 13 aa, synthetic construct
SAISREGRATYYA

SEQ ID NO: 578 - protein, 13 aa, synthetic construct
SAISGRGDNTYYA

SEQ ID NO: 579 - protein, 13 aa, synthetic construct
SSISAPGFTTYYA

SEQ ID NO: 580 - protein, 13 aa, synthetic construct
SGISPSGGITYYA

SEQ ID NO: 581 - protein, 13 aa, synthetic construct
SYINPSGGYTYYA

SEQ ID NO: 582 - protein, 13 aa, synthetic construct
SAISGNGGSTFYA

SEQ ID NO: 583 - protein, 13 aa, synthetic construct
SSITSTGDQTYYA

SEQ ID NO: 584 - protein, 13 aa, synthetic construct
TWITPSGGLTYYA

SEQ ID NO: 585 - protein, 13 aa, synthetic construct
SPITNAGDRPYYA

SEQ ID NO: 586 - protein, 13 aa, synthetic construct
SSIPSSGFNTYYA

SEQ ID NO: 587 - protein, 13 aa, synthetic construct
SAITGSGGGTSYA

SEQ ID NO: 588 - protein, 13 aa, synthetic construct
SGISPTGGITTYA

SEQ ID NO: 589 - protein, 12 aa, synthetic construct
GVIWGGGGTYYA

SEQ ID NO: 590 - protein, 12 aa, synthetic construct
GVIWGGGGTYYA

SEQ ID NO: 591 - protein, 13 aa, synthetic construct
SAISPRGGITTYA

SEQ ID NO: 592 - protein, 13 aa, synthetic construct
SSIWPRGQKTYYA

SEQ ID NO: 593 - protein, 13 aa, synthetic construct
SSISSSGGYTGYA

SEQ ID NO: 594 - protein, 13 aa, synthetic construct
SGINRTGGVTSYA

SEQ ID NO: 595 - protein, 13 aa, synthetic construct
SSIGPHGGKTYYA

SEQ ID NO: 596 - protein, 13 aa, synthetic construct
SGISPSGGITTYA

SEQ ID NO: 597 - protein, 13 aa, synthetic construct
SSIWPSGGQTWYA

SEQ ID NO: 598 - protein, 13 aa, synthetic construct
GYINPNGGYTYYA

SEQ ID NO: 599 - protein, 13 aa, synthetic construct
SYISHGGGDTYYA

SEQ ID NO: 600 - protein, 13 aa, synthetic construct
SYITPKGDHTYYA

SEQ ID NO: 601 - protein, 13 aa, synthetic construct
SAITREGRATYYA

SEQ ID NO: 602 - protein, 13 aa, synthetic construct
SIITPSGGITYYA

SEQ ID NO: 603 - protein, 13 aa, synthetic construct
SLIPHTGNPTYYA

SEQ ID NO: 604 - protein, 12 aa, synthetic construct
RVIWGGGDTYYV

SEQ ID NO: 605 - protein, 12 aa, synthetic construct
GVIWGGGNTTYY

SEQ ID NO: 606 - protein, 12 aa, synthetic construct
GVIWGGGGTYYA

SEQ ID NO: 607 - protein, 13 aa, synthetic construct
STISHGGEHTYYA

SEQ ID NO: 608 - protein, 13 aa, synthetic construct
SSIVSSGGLTLYA

SEQ ID NO: 609 - protein, 13 aa, synthetic construct
GYINPSRGNTYYA

SEQ ID NO: 610 - protein, 13 aa, synthetic construct
SAISGRGDNTYYA

SEQ ID NO: 611 - protein, 13 aa, synthetic construct
SAITGTGGETYYA

SEQ ID NO: 612 - protein, 13 aa, synthetic construct
TSISSTGFNTYYA

SEQ ID NO: 613 - protein, 13 aa, synthetic construct
SEISPSGKKKYYA

SEQ ID NO: 614 - protein, 13 aa, synthetic construct
SGISPTGCITYYA

SEQ ID NO: 615 - protein, 13 aa, synthetic construct
STISSGGGYTYYP

SEQ ID NO: 616 - protein, 13 aa, synthetic construct
SEISPSGGYTYYA

SEQ ID NO: 617 - protein, 13 aa, synthetic construct
SAITGSGGSTYYA

SEQ ID NO: 618 - protein, 13 aa, synthetic construct
SVISGSGGRPNYA

SEQ ID NO: 619 - protein, 13 aa, synthetic construct
SAITGTGGETYYA

SEQ ID NO: 620 - protein, 12 aa, synthetic construct
SGISSGGDTYYV

SEQ ID NO: 621 - protein, 13 aa, synthetic construct
SGISPSGGHTWYA

SEQ ID NO: 622 - protein, 13 aa, synthetic construct
SGISPSGGITTYA

SEQ ID NO: 623 - protein, 13 aa, synthetic construct
SAIVSSGSLTLYA

SEQ ID NO: 624 - protein, 13 aa, synthetic construct
SGISPSGGITTYA

SEQ ID NO: 625 - protein, 13 aa, synthetic construct
SSINRHGWVTYYA

SEQ ID NO: 626 - protein, 13 aa, synthetic construct
SYINRNGGITYYA

SEQ ID NO: 627 - protein, 13 aa, synthetic construct
SAIIGTGSNTYYA

SEQ ID NO: 628 - protein, 12 aa, synthetic construct
GVIWGGGDTYYV

SEQ ID NO: 629 - protein, 13 aa, synthetic construct
SGISPSGGITTYA

SEQ ID NO: 630 - protein, 13 aa, synthetic construct
SSIDDRGRYTYYA

SEQ ID NO: 631 - protein, 13 aa, synthetic construct
SAISGRGDNTYYA

SEQ ID NO: 632 - protein, 13 aa, synthetic construct
SSISSTGCNTYYA

SEQ ID NO: 633 - protein, 13 aa, synthetic construct
STIGSSGYPTYYA

SEQ ID NO: 634 - protein, 13 aa, synthetic construct
STISSGGGYTYYP

SEQ ID NO: 635 - protein, 13 aa, synthetic construct
GYINPSGGYTYYA

SEQ ID NO: 636 - protein, 13 aa, synthetic construct
SAISGSGGNTYYA

SEQ ID NO: 637 - protein, 9 aa, synthetic construct
GGIIPTNYA

SEQ ID NO: 638 - protein, 9 aa, synthetic construct
GGIIPINYA

SEQ ID NO: 639 - protein, 9 aa, synthetic construct
SAITGSYYA

SEQ ID NO: 640 - protein, 9 aa, synthetic construct
GGIIPMNYA

SEQ ID NO: 641 - protein, 9 aa, synthetic construct
SAISGSYYA

SEQ ID NO: 642 - protein, 9 aa, synthetic construct
SAINPSYYA

SEQ ID NO: 643 - protein, 9 aa, synthetic construct
SAITGSYYA

SEQ ID NO: 644 - protein, 9 aa, synthetic construct
SAITGSYYA

SEQ ID NO: 645 - protein, 9 aa, synthetic construct
SAISGSYYA

SEQ ID NO: 646 - protein, 9 aa, synthetic construct
SAISGSYYA

SEQ ID NO: 647 - protein, 9 aa, synthetic construct
GGIIPMNYA

SEQ ID NO: 648 - protein, 9 aa, synthetic construct
GGIIPINYA

SEQ ID NO: 649 - protein, 9 aa, synthetic construct
SAISGGYYA

SEQ ID NO: 650 - protein, 9 aa, synthetic construct
SAISGNYYA

SEQ ID NO: 651 - protein, 9 aa, synthetic construct
GGIIPINYA

SEQ ID NO: 652 - protein, 9 aa, synthetic construct
GGIIPINYA

SEQ ID NO: 653 - protein, 9 aa, synthetic construct
GGINPLNYA

SEQ ID NO: 654 - protein, 9 aa, synthetic construct
SAITNSYYA

SEQ ID NO: 655 - protein, 9 aa, synthetic construct
GGIIPFNYA

SEQ ID NO: 656 - protein, 9 aa, synthetic construct
GGIIPINYA

SEQ ID NO: 657 - protein, 9 aa, synthetic construct
GGIIPMNYA

SEQ ID NO: 658 - protein, 14 aa, synthetic construct
CAAAAWTIYEYDYW

SEQ ID NO: 659 - protein, 13 aa, synthetic construct
CAARPVYRTYGSW

SEQ ID NO: 660 - protein, 14 aa, synthetic construct
CAAAAWRYSEYDYW

SEQ ID NO: 661 - protein, 12 aa, synthetic construct
CAAGTRRGRNYW

SEQ ID NO: 662 - protein, 13 aa, synthetic construct
CAARRYGRRYDYW

SEQ ID NO: 663 - protein, 13 aa, synthetic construct
CAARPNYRDYEYW

SEQ ID NO: 664 - protein, 14 aa, synthetic construct
CAAAAWTIYAYNYW

SEQ ID NO: 665 - protein, 15 aa, synthetic construct
CAAVPWRWTTRRDYW

SEQ ID NO: 666 - protein, 14 aa, synthetic construct
CAANAWTIYRYDYW

SEQ ID NO: 667 - protein, 19 aa, synthetic construct
CAANLWYPVDRLNTGFNYW

SEQ ID NO: 668 - protein, 17 aa, synthetic construct
CATRLWGTWTAGDYDYW

SEQ ID NO: 669 - protein, 14 aa, synthetic construct
CAAAAWTIYTYDSW

SEQ ID NO: 670 - protein, 14 aa, synthetic construct
CAAAAWTIYEYDYW

SEQ ID NO: 671 - protein, 13 aa, synthetic construct
CATRALRDGRGYW

SEQ ID NO: 672 - protein, 14 aa, synthetic construct
CAAAAWTIYEFDSW

SEQ ID NO: 673 - protein, 13 aa, synthetic construct
CAARPRFRTYGYW

SEQ ID NO: 674 - protein, 12 aa, synthetic construct
CAAGSVYGRNYW

SEQ ID NO: 675 - protein, 17 aa, synthetic construct
CAARLWGTWTAGDYDYW

SEQ ID NO: 676 - protein, 14 aa, synthetic construct
CAAGAWTIYEYDYW

SEQ ID NO: 677 - protein, 12 aa, synthetic construct
CAAGSVYGRNSW

SEQ ID NO: 678 - protein, 14 aa, synthetic construct
CAAAAWTIYNFEYW

SEQ ID NO: 679 - protein, 17 aa, synthetic construct
CAARLWGTWTAGDYDYW

SEQ ID NO: 680 - protein, 12 aa, synthetic construct
CAAGRYSGYNSW

SEQ ID NO: 681 - protein, 12 aa, synthetic construct
CAAARRSGRGSW

SEQ ID NO: 682 - protein, 14 aa, synthetic construct
CAAAAWTIYEYDSW

SEQ ID NO: 683 - protein, 14 aa, synthetic construct
CAAAAWTIYDYDYW

SEQ ID NO: 684 - protein, 14 aa, synthetic construct
CAAGPKTPDTRNYW

SEQ ID NO: 685 - protein, 13 aa, synthetic construct
CAAVRITDGRDYW

SEQ ID NO: 686 - protein, 14 aa, synthetic construct
CAAAAWTIYEYDYW

SEQ ID NO: 687 - protein, 14 aa, synthetic construct
CAAAAWRYSEYDYW

SEQ ID NO: 688 - protein, 13 aa, synthetic construct
CATRPRFRRYDSW

SEQ ID NO: 689 - protein, 18 aa, synthetic construct
CAARGGVRSGSPGTYNYW

SEQ ID NO: 690 - protein, 14 aa, synthetic construct
CAAAAWTIYEYDYW

SEQ ID NO: 691 - protein, 17 aa, synthetic construct
CAARLWGTWTAGDYDYW

SEQ ID NO: 692 - protein, 13 aa, synthetic construct
CAARPSYNRYDSW

SEQ ID NO: 693 - protein, 14 aa, synthetic construct
CAAAAWTIYAYDYW

SEQ ID NO: 694 - protein, 14 aa, synthetic construct
CAAAAWTIYEYDYW

SEQ ID NO: 695 - protein, 11 aa, synthetic construct
CAAAGTRFDYW

SEQ ID NO: 696 - protein, 15 aa, synthetic construct
CAAVPWRWTTRRDYW

SEQ ID NO: 697 - protein, 14 aa, synthetic construct
CAAAAWTIYDYDYW

SEQ ID NO: 698 - protein, 14 aa, synthetic construct
CAARDETYGTYDYW

SEQ ID NO: 699 - protein, 17 aa, synthetic construct
CAARLWGTWTAGDYDYW

SEQ ID NO: 700 - protein, 13 aa, synthetic construct
CAARGGYGRYDSW

SEQ ID NO: 701 - protein, 14 aa, synthetic construct
CAAAAWTIYDYDYW

SEQ ID NO: 702 - protein, 14 aa, synthetic construct
CAAAAWTIYGYEYW

SEQ ID NO: 703 - protein, 12 aa, synthetic construct
CAAGRYSGYNSW

SEQ ID NO: 704 - protein, 22 aa, synthetic construct
CAANRRYSFPYWSFWYDDFDYW

SEQ ID NO: 705 - protein, 14 aa, synthetic construct
CAADVWYGSTWRNW

SEQ ID NO: 706 - protein, 12 aa, synthetic construct
CAAVFSRGPLTW

SEQ ID NO: 707 - protein, 12 aa, synthetic construct
CAQGWKIRPTIW

SEQ ID NO: 708 - protein, 14 aa, synthetic construct
CAADVWYGSTWRNW

SEQ ID NO: 709 - protein, 18 aa, synthetic construct
CASSPYGPLYRSTHYYDW

SEQ ID NO: 710 - protein, 8 aa, synthetic construct
CAIGRGSW

SEQ ID NO: 711 - protein, 11 aa, synthetic construct
CAWTTNRGMDW

SEQ ID NO: 712 - protein, 14 aa, synthetic construct
CAADVWYGSTWRNW

SEQ ID NO: 713 - protein, 20 aa, synthetic construct
CAARPYTRPGSMWVSSLYDW

SEQ ID NO: 714 - protein, 13 aa, synthetic construct
CAAQGGVLSGWDW

SEQ ID NO: 715 - protein, 11 aa, synthetic construct
CANSNKPKFDW

SEQ ID NO: 716 - protein, 12 aa, synthetic construct
CAAVFSRGPLTW

SEQ ID NO: 717 - protein, 7 aa, synthetic construct
CASAGRW

SEQ ID NO: 718 - protein, 16 aa, synthetic construct
CAAGAWSSLRKTAASW

SEQ ID NO: 719 - protein, 14 aa, synthetic construct
CAADVWYGSTWRNW

SEQ ID NO: 720 - protein, 8 aa, synthetic construct
CANFNRDW

SEQ ID NO: 721 - protein, 11 aa, synthetic construct
CANSNKPKFDW

SEQ ID NO: 722 - protein, 11 aa, synthetic construct
CAWTTNRGMDW

SEQ ID NO: 723 - protein, 13 aa, synthetic construct
CAAQFTLARHLVW

SEQ ID NO: 724 - protein, 16 aa, synthetic construct
CAAGVWSSLRHTAANW

SEQ ID NO: 725 - protein, 14 aa, synthetic construct
CAADVWYGSTWRNW

SEQ ID NO: 726 - protein, 14 aa, synthetic construct
CAADVWYGSTWRNW

SEQ ID NO: 727 - protein, 11 aa, synthetic construct
CAAEWAAMKDW

SEQ ID NO: 728 - protein, 12 aa, synthetic construct
CAQGWKIIPTDW

SEQ ID NO: 729 - protein, 16 aa, synthetic construct
CAAGVWSSLRHTAANW

SEQ ID NO: 730 - protein, 13 aa, synthetic construct
CAAQFTLARHLVW

SEQ ID NO: 731 - protein, 14 aa, synthetic construct
CAADVWYGSTWRNW

SEQ ID NO: 732 - protein, 14 aa, synthetic construct
CAARRLYSGSYLDW

SEQ ID NO: 733 - protein, 11 aa, synthetic construct
CANSNKPKFDW

SEQ ID NO: 734 - protein, 11 aa, synthetic construct
CANSNKPKFDW

SEQ ID NO: 735 - protein, 13 aa, synthetic construct
CAAQFTLARHLVW

SEQ ID NO: 736 - protein, 11 aa, synthetic construct
CAWTTNRGMDW

SEQ ID NO: 737 - protein, 10 aa, synthetic construct
CAANLRGDNW

SEQ ID NO: 738 - protein, 12 aa, synthetic construct
CAQGWKIVPTNW

SEQ ID NO: 739 - protein, 17 aa, synthetic construct
CASSGPADARNGERWAW

SEQ ID NO: 740 - protein, 11 aa, synthetic construct
CANSNKPKFDW

SEQ ID NO: 741 - protein, 11 aa, synthetic construct
CANSNKPKFDW

SEQ ID NO: 742 - protein, 11 aa, synthetic construct
CANSNKPKFDW

SEQ ID NO: 743 - protein, 14 aa, synthetic construct
CAADVWYGSTWRNW

SEQ ID NO: 744 - protein, 14 aa, synthetic construct
CAADVWYGSTWRNW

SEQ ID NO: 745 - protein, 13 aa, synthetic construct
CAAQFILARHLVW

SEQ ID NO: 746 - protein, 10 aa, synthetic construct
CAQVSQWRAW

SEQ ID NO: 747 - protein, 14 aa, synthetic construct
CAADVWYGSTWRNW

SEQ ID NO: 748 - protein, 14 aa, synthetic construct
CATWTTTWGRNRDW

SEQ ID NO: 749 - protein, 9 aa, synthetic construct
CANGGSSYW

SEQ ID NO: 750 - protein, 12 aa, synthetic construct
CAGSWSYPGLTW

SEQ ID NO: 751 - protein, 14 aa, synthetic construct
CAADVWYGSTWRNW

SEQ ID NO: 752 - protein, 18 aa, synthetic construct
CAADFWLARLRVADDYDW

SEQ ID NO: 753 - protein, 12 aa, synthetic construct
CAQGWKIVPTNW

SEQ ID NO: 754 - protein, 8 aa, synthetic construct
CALYRVNW

SEQ ID NO: 755 - protein, 13 aa, synthetic construct
CAAQGGVLSGWDW

SEQ ID NO: 756 - protein, 7 aa, synthetic construct
CASAGRW

SEQ ID NO: 757 - protein, 7 aa, synthetic construct
CASAGRW

SEQ ID NO: 758 - protein, 18 aa, synthetic construct
CASSPYGPLYRSTHYYDW

SEQ ID NO: 759 - protein, 14 aa, synthetic construct
CATGWQSTTKSQGW

SEQ ID NO: 760 - protein, 9 aa, synthetic construct
CAAFREYHW

SEQ ID NO: 761 - protein, 16 aa, synthetic construct
CAAGVWSSLRHTAANW

SEQ ID NO: 762 - protein, 14 aa, synthetic construct
CAADVWYGSTWRNW

SEQ ID NO: 763 - protein, 14 aa, synthetic construct
CAADVWYGSTWRNW

SEQ ID NO: 764 - protein, 12 aa, synthetic construct
CAAVFSRGPLTW

SEQ ID NO: 765 - protein, 14 aa, synthetic construct
CAADVWYGSTWRNW

SEQ ID NO: 766 - protein, 14 aa, synthetic construct
CAADVWYGSTWRNW

SEQ ID NO: 767 - protein, 12 aa, synthetic construct
CAAVFSRGPLTW

SEQ ID NO: 768 - protein, 14 aa, synthetic construct
CAADVWYGSTWRNW

SEQ ID NO: 769 - protein, 20 aa, synthetic construct
CAARPYTRPGSMWVSSLYDW

SEQ ID NO: 770 - protein, 14 aa, synthetic construct
CAADVWYGSTWRNW

SEQ ID NO: 771 - protein, 11 aa, synthetic construct
CANSNKPKFDW

SEQ ID NO: 772 - protein, 18 aa, synthetic construct
CASSPYGPLYRSTHYYDW

SEQ ID NO: 773 - protein, 14 aa, synthetic construct
CAADVWYGSTWRNW

SEQ ID NO: 774 - protein, 14 aa, synthetic construct
CAADVWYGSTWRNW

SEQ ID NO: 775 - protein, 14 aa, synthetic construct
CAADVWYGSTWRNW

SEQ ID NO: 776 - protein, 17 aa, synthetic construct
CAASEWGGSDYDHDYDW

SEQ ID NO: 777 - protein, 18 aa, synthetic construct
CASSPYGPLYRSTHYYDW

SEQ ID NO: 778 - protein, 14 aa, synthetic construct
CAADVWYGSTWRNW

SEQ ID NO: 779 - protein, 14 aa, synthetic construct
CAADVWYGSTWRNW

SEQ ID NO: 780 - protein, 14 aa, synthetic construct
CAADVWYGSTWRNW

SEQ ID NO: 781 - protein, 17 aa, synthetic construct
CAASEWGGSDYDHDYDW

SEQ ID NO: 782 - protein, 14 aa, synthetic construct
CAADVWYGSTWRNW

SEQ ID NO: 783 - protein, 14 aa, synthetic construct
CAADVWYGSTWRNW

SEQ ID NO: 784 - protein, 13 aa, synthetic construct
CAAKRLRSGRWTW

SEQ ID NO: 785 - protein, 11 aa, synthetic construct
CANSNKPKFDW

SEQ ID NO: 786 - protein, 18 aa, synthetic construct
CAAETFGSGSSLMSEYDW

SEQ ID NO: 787 - protein, 12 aa, synthetic construct
CAQGWKIVPTNW

SEQ ID NO: 788 - protein, 14 aa, synthetic construct
CAADVWYGSTWRNW

SEQ ID NO: 789 - protein, 18 aa, synthetic construct
CASSPYGPLYRSTHYYDW

SEQ ID NO: 790 - protein, 14 aa, synthetic construct
CAAVRTYGSATYDW

SEQ ID NO: 791 - protein, 12 aa, synthetic construct
CAAGGRYSARVW

SEQ ID NO: 792 - protein, 14 aa, synthetic construct
CATYGYDSGRYYSW

SEQ ID NO: 793 - protein, 14 aa, synthetic construct
CAADVWYGSTWRNW

SEQ ID NO: 794 - protein, 14 aa, synthetic construct
CAADVWYGSTWRNW

SEQ ID NO: 795 - protein, 14 aa, synthetic construct
CAADVWYGSTWRNW

SEQ ID NO: 796 - protein, 19 aa, synthetic construct
CAATQWGSSGWKQARWYDW

SEQ ID NO: 797 - protein, 14 aa, synthetic construct
CAADVWYGSTWRNW

SEQ ID NO: 798 - protein, 14 aa, synthetic construct
CAADVWYGSTWRNW

SEQ ID NO: 799 - protein, 16 aa, synthetic construct
CAVNGRWRSWSSQRDW

SEQ ID NO: 800 - protein, 14 aa, synthetic construct
CAADVWYGSTWRNW

SEQ ID NO: 801 - protein, 14 aa, synthetic construct
CAADVWYGSTWRNW

SEQ ID NO: 802 - protein, 12 aa, synthetic construct
CAAVFSRGLLTC

SEQ ID NO: 803 - protein, 15 aa, synthetic construct
CAAARFAPGSRGYDW

SEQ ID NO: 804 - protein, 14 aa, synthetic construct
CAADVWYGSTWRNW

SEQ ID NO: 805 - protein, 11 aa, synthetic construct
CAAQGGVLSAW

SEQ ID NO: 806 - protein, 14 aa, synthetic construct
CAADVWYGSTWRNW

SEQ ID NO: 807 - protein, 14 aa, synthetic construct
CAADVWYGSTWRNW

SEQ ID NO: 808 - protein, 14 aa, synthetic construct
CAADVWYGSTWRNW

SEQ ID NO: 809 - protein, 14 aa, synthetic construct
CAADVWYGSTWRNW

SEQ ID NO: 810 - protein, 14 aa, synthetic construct
CAADVWYGSTWRNW

SEQ ID NO: 811 - protein, 13 aa, synthetic construct
CAARPNTRPGSMW

SEQ ID NO: 812 - protein, 14 aa, synthetic construct
CAADVWYGSTWRNW

SEQ ID NO: 813 - protein, 13 aa, synthetic construct
CAMSSVTRGSSDW

SEQ ID NO: 814 - protein, 14 aa, synthetic construct
CAADVWYGSTWRNW

SEQ ID NO: 815 - protein, 11 aa, synthetic construct
CAAFRGRMYDW

SEQ ID NO: 816 - protein, 14 aa, synthetic construct
CAADVWYGSTWRNW

SEQ ID NO: 817 - protein, 12 aa, synthetic construct
CAAVFSRGPLTW

SEQ ID NO: 818 - protein, 13 aa, synthetic construct
CAMSSVTRGSSDW

SEQ ID NO: 819 - protein, 12 aa, synthetic construct
CARSWPYFFYCW

SEQ ID NO: 820 - protein, 12 aa, synthetic construct
CARIFSYALDYW

SEQ ID NO: 821 - protein, 11 aa, synthetic construct
CAKDQWPFDYW

SEQ ID NO: 822 - protein, 14 aa, synthetic construct
CAKYTGRWEPYDYW

SEQ ID NO: 823 - protein, 11 aa, synthetic construct
CAKAFSTFDYW

SEQ ID NO: 824 - protein, 9 aa, synthetic construct
CASLSRGYW

SEQ ID NO: 825 - protein, 12 aa, synthetic construct
CARSYGGGFDYW

SEQ ID NO: 826 - protein, 14 aa, synthetic construct
CAKYTGRWEPYDYW

SEQ ID NO: 827 - protein, 12 aa, synthetic construct
CAKKLSNGFDYW

SEQ ID NO: 828 - protein, 12 aa, synthetic construct
CAKGWFGGFNYW

SEQ ID NO: 829 - protein, 14 aa, synthetic construct
CARSSFYYYALDYW

SEQ ID NO: 830 - protein, 14 aa, synthetic construct
CAKYTGRWEPYDYW

SEQ ID NO: 831 - protein, 14 aa, synthetic construct
CARVIAAAGAFDYW

SEQ ID NO: 832 - protein, 11 aa, synthetic construct
CAKSGRRFDYW

SEQ ID NO: 833 - protein, 9 aa, synthetic construct
CASLSRGYW

SEQ ID NO: 834 - protein, 12 aa, synthetic construct
CAKKLSNGFDYW

SEQ ID NO: 835 - protein, 12 aa, synthetic construct
CARSYGGGFDYW

SEQ ID NO: 836 - protein, 17 aa, synthetic construct
CAKAHGNPVSDLSFDYW

SEQ ID NO: 837 - protein, 12 aa, synthetic construct
CAKWFSRNFDYC

SEQ ID NO: 838 - protein, 12 aa, synthetic construct
CARSYGGGFDYW

SEQ ID NO: 839 - protein, 12 aa, synthetic construct
CARSYGGGFDYW

SEQ ID NO: 840 - protein, 14 aa, synthetic construct
CAKSSFDKYNFDYW

SEQ ID NO: 841 - protein, 21 aa, synthetic construct
CARGGRLYDILTGQGAPFDYW

SEQ ID NO: 842 - protein, 11 aa, synthetic construct
CAKGRRRFDYW

SEQ ID NO: 843 - protein, 15 aa, synthetic construct
CARGPYGRYAALDYW

SEQ ID NO: 844 - protein, 14 aa, synthetic construct
CARSSFYYYALDYW

SEQ ID NO: 845 - protein, 12 aa, synthetic construct
CAKAGPRGFDYW

SEQ ID NO: 846 - protein, 15 aa, synthetic construct
CAKVKLGGGPNFDYW

SEQ ID NO: 847 - protein, 13 aa, synthetic construct
CAKGNSRYVFDYW

SEQ ID NO: 848 - protein, 14 aa, synthetic construct
CARAGQWLGDFDYW

SEQ ID NO: 849 - protein, 15 aa, synthetic construct
CAKSGTRIKQGFDYW

SEQ ID NO: 850 - protein, 14 aa, synthetic construct
CAKDRIPNLHFDYW

SEQ ID NO: 851 - protein, 13 aa, synthetic construct
CARGGYYYALDYW

SEQ ID NO: 852 - protein, 18 aa, synthetic construct
CAKIRNLHWDVGRQFDYW

SEQ ID NO: 853 - protein, 15 aa, synthetic construct
CARDGSYSSSWYGYW

SEQ ID NO: 854 - protein, 11 aa, synthetic construct
CAKHWNRFDYW

SEQ ID NO: 855 - protein, 12 aa, synthetic construct
CARDAYLHFDYW

SEQ ID NO: 856 - protein, 16 aa, synthetic construct
CAKSPLVRNNGQFDYW

SEQ ID NO: 857 - protein, 14 aa, synthetic construct
CARGGSWEEDFDYW

SEQ ID NO: 858 - protein, 14 aa, synthetic construct
CAKSSFDKYNFDYW

SEQ ID NO: 859 - protein, 15 aa, synthetic construct
CAKGGGLPYLSFDYW

SEQ ID NO: 860 - protein, 12 aa, synthetic construct
CAKGWLGNFDYW

SEQ ID NO: 861 - protein, 13 aa, synthetic construct
CARRHWPGGFDYW

SEQ ID NO: 862 - protein, 12 aa, synthetic construct
CARDTYLHFDYW

SEQ ID NO: 863 - protein, 14 aa, synthetic construct
CAKRWTFNTAFDYW

SEQ ID NO: 864 - protein, 13 aa, synthetic construct
CAREWQHGPVAYW

SEQ ID NO: 865 - protein, 16 aa, synthetic construct
CAKSPSSLLATYFDYW

SEQ ID NO: 866 - protein, 12 aa, synthetic construct
CARAGGGGFDYC

SEQ ID NO: 867 - protein, 12 aa, synthetic construct
CARSYGGGFDYW

SEQ ID NO: 868 - protein, 12 aa, synthetic construct
CAKAYYGGFDYW

SEQ ID NO: 869 - protein, 12 aa, synthetic construct
CARDTYLHFDYW

SEQ ID NO: 870 - protein, 12 aa, synthetic construct
CARVWRNHLDYW

SEQ ID NO: 871 - protein, 12 aa, synthetic construct
CARVWRNSLDYW

SEQ ID NO: 872 - protein, 15 aa, synthetic construct
CARAPRGYSYGYYYW

SEQ ID NO: 873 - protein, 11 aa, synthetic construct
CAKSGRRFDYW

SEQ ID NO: 874 - protein, 9 aa, synthetic construct
CASLSRGYC

SEQ ID NO: 875 - protein, 14 aa, synthetic construct
CARVIAAAGAFDYW

SEQ ID NO: 876 - protein, 12 aa, synthetic construct
CAKAVPKGFDYW

SEQ ID NO: 877 - protein, 16 aa, synthetic construct
CARSPLVHYNRGFQYC

SEQ ID NO: 878 - protein, 19 aa, synthetic construct
CAKQAPGEKWLARGRLDYW

SEQ ID NO: 879 - protein, 12 aa, synthetic construct
CARSYGGGFDYW

SEQ ID NO: 880 - protein, 11 aa, synthetic construct
CAKGTRTFDYW

SEQ ID NO: 881 - protein, 14 aa, synthetic construct
CARVITPLDILTYW

SEQ ID NO: 882 - protein, 12 aa, synthetic construct
CARSYGGGFDYW

SEQ ID NO: 883 - protein, 16 aa, synthetic construct
CARHGAGYFGWYNDCC

SEQ ID NO: 884 - protein, 16 aa, synthetic construct
CAKSSLPSGQGHFDYW

SEQ ID NO: 885 - protein, 13 aa, synthetic construct
CARGGYYYALDYW

SEQ ID NO: 886 - protein, 9 aa, synthetic construct
CANLSPGYW

SEQ ID NO: 887 - protein, 12 aa, synthetic construct
CARIFSYALDYW

SEQ ID NO: 888 - protein, 11 aa, synthetic construct
CPKGGTSFDYW

SEQ ID NO: 889 - protein, 9 aa, synthetic construct
CARLSRGYW

SEQ ID NO: 890 - protein, 15 aa, synthetic construct
CAKGFRLFPRTFDYW

SEQ ID NO: 891 - protein, 15 aa, synthetic construct
CAKGFRLFPRTFDYW

SEQ ID NO: 892 - protein, 15 aa, synthetic construct
CAKVASDRSVLYDYW

SEQ ID NO: 893 - protein, 14 aa, synthetic construct
CAKVRPFWGTFDYW

SEQ ID NO: 894 - protein, 13 aa, synthetic construct
CAKGNSRYVFDYW

SEQ ID NO: 895 - protein, 11 aa, synthetic construct
CAKGGTSFDYW

SEQ ID NO: 896 - protein, 12 aa, synthetic construct
CARSYGGGFDYW

SEQ ID NO: 897 - protein, 12 aa, synthetic construct
CARSGPYYFDYW

SEQ ID NO: 898 - protein, 14 aa, synthetic construct
CAKSSFDKYNFDYW

SEQ ID NO: 899 - protein, 12 aa, synthetic construct
CARDTYLHFDYW

SEQ ID NO: 900 - protein, 12 aa, synthetic construct
CARDTYLHFDYW

SEQ ID NO: 901 - protein, 13 aa, synthetic construct
CATAESYKGYDYW

SEQ ID NO: 902 - protein, 14 aa, synthetic construct
CAKYTGRWEPYDYW

SEQ ID NO: 903 - protein, 11 aa, synthetic construct [sequence omitted]

SEQ ID NO: 904 - protein, 11 aa, synthetic construct
CAKGGTSFDYW

SEQ ID NO: 905 - protein, 12 aa, synthetic construct
CAKKLSNGFDYW

SEQ ID NO: 906 - protein, 12 aa, synthetic construct
CAKVWRNHLDYW

SEQ ID NO: 907 - protein, 12 aa, synthetic construct
CARSYRGGFDYW

SEQ ID NO: 908 - protein, 12 aa, synthetic construct
CARVWRNHLDYW

SEQ ID NO: 909 - protein, 14 aa, synthetic construct
CARVIAAAGAFDYW

SEQ ID NO: 910 - protein, 21 aa, synthetic construct
CARGGRLYDILTGQGAPFDYW

SEQ ID NO: 911 - protein, 14 aa, synthetic construct
CAKSSFDKYNFDYW

SEQ ID NO: 912 - protein, 13 aa, synthetic construct
CAKGHSLCVFYYW

SEQ ID NO: 913 - protein, 12 aa, synthetic construct
CARDTYLHFDYW

SEQ ID NO: 914 - protein, 15 aa, synthetic construct
CARGSYIIWSALDYW

SEQ ID NO: 915 - protein, 12 aa, synthetic construct
CARVWRNHLDYW

SEQ ID NO: 916 - protein, 12 aa, synthetic construct
CAREGLWAFDYW

SEQ ID NO: 917 - protein, 12 aa, synthetic construct
CAKWSSRAFDYW

SEQ ID NO: 918 - protein, 14 aa, synthetic construct
CAKYTGRWEPYDYW

SEQ ID NO: 919 - protein, 11 aa, synthetic construct
CAKGGTSYDYW

SEQ ID NO: 920 - protein, 13 aa, synthetic construct
CAKGNSRYVFDYW

SEQ ID NO: 921 - protein, 13 aa, synthetic construct
CARRHWPGGFDYW

SEQ ID NO: 922 - protein, 14 aa, synthetic construct
CARHNRAIGTFDYW

SEQ ID NO: 923 - protein, 10 aa, synthetic construct
CARSVLLDYW

SEQ ID NO: 924 - protein, 12 aa, synthetic construct
CARSDRVGFCCW

SEQ ID NO: 925 - protein, 12 aa, synthetic construct
CAKVRTFRLNYC

SEQ ID NO: 926 - protein, 14 aa, synthetic construct
CAKYTGRWEPYDYW

SEQ ID NO: 927 - protein, 19 aa, synthetic construct
CAKQAPGEKWLARGRLHYW

SEQ ID NO: 928 - protein, 14 aa, synthetic construct
CAKVRPFWGTFDYW

SEQ ID NO: 929 - protein, 12 aa, synthetic construct
CAKAVPKGFDYW

SEQ ID NO: 930 - protein, 11 aa, synthetic construct
CAKTPRKFDYW

SEQ ID NO: 931 - protein, 12 aa, synthetic construct
CAKAVPKGFDYW

SEQ ID NO: 932 - protein, 19 aa, synthetic construct
CAKQAPGEKWLARGRLDYW

SEQ ID NO: 933 - protein, 12 aa, synthetic construct
CARSYGGGFDYW

SEQ ID NO: 934 - protein, 12 aa, synthetic construct
CARVWRNHLDYW

SEQ ID NO: 935 - protein, 14 aa, synthetic construct
CARWRGGLSAFDVW

SEQ ID NO: 936 - protein, 19 aa, synthetic construct
CARAFGLASGKGPGVFDYW

SEQ ID NO: 937 - protein, 15 aa, synthetic construct
CARVLGNSGRGLDYW

SEQ ID NO: 938 - protein, 15 aa, synthetic construct
CARGSHQLYYAFEYW

SEQ ID NO: 939 - protein, 16 aa, synthetic construct
CARDVEGQVGHFFDPW

SEQ ID NO: 940 - protein, 20 aa, synthetic construct
CAKGIKAFGGTRLPLYFDSW

SEQ ID NO: 941 - protein, 15 aa, synthetic construct
CAKHLLSRSRGLDVW

SEQ ID NO: 942 - protein, 15 aa, synthetic construct
CAKHLLARSGGMHLW

SEQ ID NO: 943 - protein, 13 aa, synthetic construct
CARSTRDRAFDYW

SEQ ID NO: 944 - protein, 13 aa, synthetic construct
CVKVGDYFAFDHW

SEQ ID NO: 945 - protein, 15 aa, synthetic construct
CARGTALVRRAFDIW

SEQ ID NO: 946 - protein, 19 aa, synthetic construct
CARAFGLASGKGPGVFDYW

SEQ ID NO: 947 - protein, 14 aa, synthetic construct
CAKHRVGARAFDVW

SEQ ID NO: 948 - protein, 14 aa, synthetic construct
CAKHRVGARAFDVW

SEQ ID NO: 949 - protein, 16 aa, synthetic construct
CARHPRDFGIHGLDVW

SEQ ID NO: 950 - protein, 13 aa, synthetic construct
CARVRGGYYYDTW

SEQ ID NO: 951 - protein, 15 aa, synthetic construct
CATGGGHFRSGRDVW

SEQ ID NO: 952 - protein, 14 aa, synthetic construct
CARHLRLGRGFDSW

SEQ ID NO: 953 - protein, 15 aa, synthetic construct
CATPSGGIGRRLDVW

SEQ ID NO: 954 - protein, 19 aa, synthetic construct
CAKAFGLASGKGPGVFDYW

SEQ ID NO: 955 - protein, 18 aa, synthetic construct
CARESRTLFGVPNAFDIW

SEQ ID NO: 956 - protein, 16 aa, synthetic construct
RSSQSLVHSTGNTYLH

SEQ ID NO: 957 - protein, 11 aa, synthetic construct
RTSQDIGNYLN

SEQ ID NO: 958 - protein, 16 aa, synthetic construct
RSSQSLVHSTGNTYLH

SEQ ID NO: 959 - protein, 16 aa, synthetic construct
RSSQSLVHSTGNTYLH

SEQ ID NO: 960 - protein, 16 aa, synthetic construct
RSSQSLVHSTGNTYLH

SEQ ID NO: 961 - protein, 16 aa, synthetic construct
RSSQSLVHSTGNTYLH

SEQ ID NO: 962 - protein, 11 aa, synthetic construct
SGDKLRNKYAS

SEQ ID NO: 963 - protein, 16 aa, synthetic construct
RSSQSLVHSTGNTYLH

SEQ ID NO: 964 - protein, 16 aa, synthetic construct
RSSQSLVHSTGNTYLH

SEQ ID NO: 965 - protein, 16 aa, synthetic construct
RSSQSLVHSTGNTYLH

SEQ ID NO: 966 - protein, 16 aa, synthetic construct
RSSQSLVHSTGNTYLH

SEQ ID NO: 967 - protein, 11 aa, synthetic construct
SGDKLGHTYTS

SEQ ID NO: 968 - protein, 11 aa, synthetic construct
RASQSIREYLH

SEQ ID NO: 969 - protein, 11 aa, synthetic construct
SGDTLGGKYAW

SEQ ID NO: 970 - protein, 13 aa, synthetic construct
QSSQSVYSNNELS

SEQ ID NO: 971 - protein, 11 aa, synthetic construct
SGDKLGHTYTS

SEQ ID NO: 972 - protein, 11 aa, synthetic construct
RASQTIERRLN

SEQ ID NO: 973 - protein, 11 aa, synthetic construct
SGDKLGDKYTS

SEQ ID NO: 974 - protein, 16 aa, synthetic construct
RSSQSLVHSTGNTYLH

SEQ ID NO: 975 - protein, 16 aa, synthetic construct
RSSQSLVHSTGNTYLH

SEQ ID NO: 976 - protein, 16 aa, synthetic construct
RSSQSLVHSTGNTYLH

SEQ ID NO: 977 - protein, 11 aa, synthetic construct
RASQGVRTSLA

SEQ ID NO: 978 - protein, 16 aa, synthetic construct
RSSQSLVHSTGNTYLH

SEQ ID NO: 979 - protein, 16 aa, synthetic construct
RSSQSLVHSTGNTYLH

SEQ ID NO: 980 - protein, 11 aa, synthetic construct
RASQTIERRLN

SEQ ID NO: 981 - protein, 11 aa, synthetic construct
RASQTIGDYLN

SEQ ID NO: 982 - protein, 16 aa, synthetic construct
RSSQSLVHSTGNTYLH

SEQ ID NO: 983 - protein, 11 aa, synthetic construct
QGASLRNYYAS

SEQ ID NO: 984 - protein, 11 aa, synthetic construct
RASQSISNNLN

SEQ ID NO: 985 - protein, 11 aa, synthetic construct
RASQPIGPDLL

SEQ ID NO: 986 - protein, 11 aa, synthetic construct
RASQSIRRFLN

SEQ ID NO: 987 - protein, 16 aa, synthetic construct
RSSQSLVHSTGNTYLH

SEQ ID NO: 988 - protein, 16 aa, synthetic construct
RSSQSLVHSTGNTYLH

SEQ ID NO: 989 - protein, 11 aa, synthetic construct
RANQNIGNFLN

SEQ ID NO: 990 - protein, 11 aa, synthetic construct
SGNKLGDKYAS

SEQ ID NO: 991 - protein, 16 aa, synthetic construct
RSSQSLVHSTGNTYLH

SEQ ID NO: 992 - protein, 16 aa, synthetic construct
RSSQSLVHSTGNTYLH

SEQ ID NO: 993 - protein, 16 aa, synthetic construct
RSSQSLVHSTGNTYLH

SEQ ID NO: 994 - protein, 16 aa, synthetic construct
RSSQSLVHSTGNTYLH

SEQ ID NO: 995 - protein, 11 aa, synthetic construct
RASQDIGNFLN

SEQ ID NO: 996 - protein, 16 aa, synthetic construct
RSSQSLVHSTGNTYLH

SEQ ID NO: 997 - protein, 11 aa, synthetic construct
RASQGVRTSLA

SEQ ID NO: 998 - protein, 11 aa, synthetic construct
RASQSIRRYLN

SEQ ID NO: 999 - protein, 16 aa, synthetic construct
RSSQSLVHSTGNTYLH

SEQ ID NO: 1000 - protein, 11 aa, synthetic construct
RASQSIRRYLN

SEQ ID NO: 1001 - protein, 16 aa, synthetic construct
RSSQSLVHSTGNTYLH

SEQ ID NO: 1002 - protein, 16 aa, synthetic construct
RSSQSLVHSTGNTYLH

SEQ ID NO: 1003 - protein, 16 aa, synthetic construct
RSSQSLVHSTGNTYLH

SEQ ID NO: 1004 - protein, 16 aa, synthetic construct
RSSQSLVHSTGNTYLH

SEQ ID NO: 1005 - protein, 16 aa, synthetic construct
RSSQSLVHSTGNTYLH

SEQ ID NO: 1006 - protein, 11 aa, synthetic construct
RASQGVRTSLA

SEQ ID NO: 1007 - protein, 16 aa, synthetic construct
RSSQSLVHSTGNTYLH

SEQ ID NO: 1008 - protein, 11 aa, synthetic construct
RASQTIGDYLN

SEQ ID NO: 1009 - protein, 11 aa, synthetic construct
KASDHIGKFLT

SEQ ID NO: 1010 - protein, 11 aa, synthetic construct
RASQTIGDYLN

SEQ ID NO: 1011 - protein, 16 aa, synthetic construct
RSSQSLVHSTGNTYLH

SEQ ID NO: 1012 - protein, 16 aa, synthetic construct
RSSQSLVHSTGNTYLH

SEQ ID NO: 1013 - protein, 16 aa, synthetic construct
RSSQSLVHSTGNTYLH

SEQ ID NO: 1014 - protein, 16 aa, synthetic construct
RSSQSLVHSTGNTYLH

SEQ ID NO: 1015 - protein, 16 aa, synthetic construct
RSSQSLVHSTGNTYLH

SEQ ID NO: 1016 - protein, 16 aa, synthetic construct
RSSQSLVHSTGNTYLH

SEQ ID NO: 1017 - protein, 16 aa, synthetic construct
RSSQSLVHSTGNTYLH

SEQ ID NO: 1018 - protein, 16 aa, synthetic construct
RSSQSLVHSTGNTYLH

SEQ ID NO: 1019 - protein, 16 aa, synthetic construct
RSSQSLVHSTGNTYLH

SEQ ID NO: 1020 - protein, 16 aa, synthetic construct
RSSQSLVHSTGNTYLH

SEQ ID NO: 1021 - protein, 16 aa, synthetic construct
RSSQSLVHSTGNTYLH

SEQ ID NO: 1022 - protein, 16 aa, synthetic construct
RSSQSLVHSTGNTYLH

SEQ ID NO: 1023 - protein, 16 aa, synthetic construct
RSSQSLVHSTGNTYLH

SEQ ID NO: 1024 - protein, 11 aa, synthetic construct
RASQNIRSYLN

SEQ ID NO: 1025 - protein, 16 aa, synthetic construct
RSSQSLVHSTGNTYLH

SEQ ID NO: 1026 - protein, 16 aa, synthetic construct
RSSQSLVHSTGNTYLH

SEQ ID NO: 1027 - protein, 11 aa, synthetic construct
RASHNINSYLN

SEQ ID NO: 1028 - protein, 16 aa, synthetic construct
RSSQSLVHSTGNTYLH

SEQ ID NO: 1029 - protein, 16 aa, synthetic construct
RSSQSLVHSTGNTYLH

SEQ ID NO: 1030 - protein, 16 aa, synthetic construct
RSSQSLVHSTGNTYLH

SEQ ID NO: 1031 - protein, 16 aa, synthetic construct
RSSQSLVHSTGNTYLH

SEQ ID NO: 1032 - protein, 11 aa, synthetic construct
RASQSVRSYLN

SEQ ID NO: 1033 - protein, 16 aa, synthetic construct
RSSQSLVHSTGNTYLH

SEQ ID NO: 1034 - protein, 11 aa, synthetic construct
RASQSVRSYLN

SEQ ID NO: 1035 - protein, 11 aa, synthetic construct
RASQGVRTSLA

SEQ ID NO: 1036 - protein, 16 aa, synthetic construct
RSSQSLVHSTGNTYLH

SEQ ID NO: 1037 - protein, 16 aa, synthetic construct
RSSQSLVHSTGNTYLH

SEQ ID NO: 1038 - protein, 11 aa, synthetic construct
SGDKLGDKYTS

SEQ ID NO: 1039 - protein, 11 aa, synthetic construct
SGDKLGHTYTS

SEQ ID NO: 1040 - protein, 16 aa, synthetic construct
RSSQSLVHSTGNTYLH

SEQ ID NO: 1041 - protein, 16 aa, synthetic construct
RSSQSLVHSTGNTYLH

SEQ ID NO: 1042 - protein, 11 aa, synthetic construct
RASQTIGDYLN

SEQ ID NO: 1043 - protein, 16 aa, synthetic construct
RSSQSLVHSTGNTYLH

SEQ ID NO: 1044 - protein, 16 aa, synthetic construct
RSSQSLVHSTGNTYLH

SEQ ID NO: 1045 - protein, 11 aa, synthetic construct
SGDRLGEKYVS

SEQ ID NO: 1046 - protein, 11 aa, synthetic construct
RASQSIREYLH

SEQ ID NO: 1047 - protein, 16 aa, synthetic construct
RSSQSLVHSTGNTYLH

SEQ ID NO: 1048 - protein, 11 aa, synthetic construct
SASQDINKYLN

SEQ ID NO: 1049 - protein, 16 aa, synthetic construct
RSSQSLVHSTGNTYLH

SEQ ID NO: 1050 - protein, 11 aa, synthetic construct
RASQGVRTSLA

SEQ ID NO: 1051 - protein, 16 aa, synthetic construct
RSSQSLVHSTGNTYLH

SEQ ID NO: 1052 - protein, 16 aa, synthetic construct
RSSQSLVHSTGNTYLH

SEQ ID NO: 1053 - protein, 11 aa, synthetic construct
RASHFIGSLLS

SEQ ID NO: 1054 - protein, 16 aa, synthetic construct
RSSQSLVHSTGNTYLH

SEQ ID NO: 1055 - protein, 16 aa, synthetic construct
RSSQSLVHSTGNTYLH

SEQ ID NO: 1056 - protein, 16 aa, synthetic construct
RSSQSLVHSTGNTYLH

SEQ ID NO: 1057 - protein, 11 aa, synthetic construct
RASQSISNNLN

SEQ ID NO: 1058 - protein, 16 aa, synthetic construct
RSSQSLVHSTGNTYLH

SEQ ID NO: 1059 - protein, 11 aa, synthetic construct
RASQSISNNLN

SEQ ID NO: 1060 - protein, 16 aa, synthetic construct
RSSQSLVHSTGNTYLH

SEQ ID NO: 1061 - protein, 16 aa, synthetic construct
RSSQSLVHSTGNTYLH

SEQ ID NO: 1062 - protein, 16 aa, synthetic construct
RSSQSLVHSTGNTYLH

SEQ ID NO: 1063 - protein, 16 aa, synthetic construct
RSSQSLVHSTGNTYLH

SEQ ID NO: 1064 - protein, 16 aa, synthetic construct
RSSQSLVHSTGNTYLH

SEQ ID NO: 1065 - protein, 11 aa, synthetic construct
RASQTIERRLN

SEQ ID NO: 1066 - protein, 11 aa, synthetic construct
SGDNLRGYYAS

SEQ ID NO: 1067 - protein, 16 aa, synthetic construct
RSSQSLVHSTGNTYLH

SEQ ID NO: 1068 - protein, 11 aa, synthetic construct
SGDKLGHTYTS

SEQ ID NO: 1069 - protein, 11 aa, synthetic construct
RASQSISNNLN

SEQ ID NO: 1070 - protein, 16 aa, synthetic construct
RSSQSLVHSTGNTYLH

SEQ ID NO: 1071 - protein, 11 aa, synthetic construct
RASQTIERRLN

SEQ ID NO: 1072 - protein, 12 aa, synthetic construct
RASQSVSSGYLA

SEQ ID NO: 1073 - protein, 11 aa, synthetic construct
RASQSINTFLN

SEQ ID NO: 1074 - protein, 11 aa, synthetic construct
RASQSVSSYLN

SEQ ID NO: 1075 - protein, 11 aa, synthetic construct
RASQSIRTYLN

SEQ ID NO: 1076 - protein, 12 aa, synthetic construct
RASQSVSSGYLA

SEQ ID NO: 1077 - protein, 11 aa, synthetic construct
RASQHIGKYLN

SEQ ID NO: 1078 - protein, 11 aa, synthetic construct
RASQSIGGYLN

SEQ ID NO: 1079 - protein, 11 aa, synthetic construct
RASQSINTFLN

SEQ ID NO: 1080 - protein, 11 aa, synthetic construct
RASQNIGKYLN

SEQ ID NO: 1081 - protein, 11 aa, synthetic construct
RASQNIRNYLN

SEQ ID NO: 1082 - protein, 11 aa, synthetic construct
RASQSIKNYLN

SEQ ID NO: 1083 - protein, 11 aa, synthetic construct
RASQSINTFLN

SEQ ID NO: 1084 - protein, 11 aa, synthetic construct
RASQSITRYLN

SEQ ID NO: 1085 - protein, 11 aa, synthetic construct
RASEKISTYLN

SEQ ID NO: 1086 - protein, 12 aa, synthetic construct
RASQSVNSNHLA

SEQ ID NO: 1087 - protein, 11 aa, synthetic construct
RASQSISNYLN

SEQ ID NO: 1088 - protein, 11 aa, synthetic construct
RASQSITRYLN

SEQ ID NO: 1089 - protein, 11 aa, synthetic construct
RASQSVGSYLN

SEQ ID NO: 1090 - protein, 12 aa, synthetic construct
RASHSVSNNYLA

SEQ ID NO: 1091 - protein, 11 aa, synthetic construct
RASQSINTFLN

SEQ ID NO: 1092 - protein, 12 aa, synthetic construct
RASQSVSGTYLA

SEQ ID NO: 1093 - protein, 7 aa, synthetic construct
AASDLES

SEQ ID NO: 1094 - protein, 7 aa, synthetic construct
PKHNRPP

SEQ ID NO: 1095 - protein, 7 aa, synthetic construct
AASDLES

SEQ ID NO: 1096 - protein, 7 aa, synthetic construct
AASDLES

SEQ ID NO: 1097 - protein, 7 aa, synthetic construct
AASDLES

SEQ ID NO: 1098 - protein, 7 aa, synthetic construct
AASDLES

SEQ ID NO: 1099 - protein, 7 aa, synthetic construct
GQHNRPS

SEQ ID NO: 1100 - protein, 7 aa, synthetic construct
AASDLES

SEQ ID NO: 1101 - protein, 7 aa, synthetic construct
AASDLES

SEQ ID NO: 1102 - protein, 7 aa, synthetic construct
AASDLES

SEQ ID NO: 1103 - protein, 7 aa, synthetic construct
AASDLES

SEQ ID NO: 1104 - protein, 7 aa, synthetic construct
YTSSLHS

SEQ ID NO: 1105 - protein, 7 aa, synthetic construct
FGSELRK

SEQ ID NO: 1106 - protein, 7 aa, synthetic construct
QNDKRPS

SEQ ID NO: 1107 - protein, 7 aa, synthetic construct
GTSYRYS

SEQ ID NO: 1108 - protein, 7 aa, synthetic construct
RTSWLQS

SEQ ID NO: 1109 - protein, 7 aa, synthetic construct
QNDKRPS

SEQ ID NO: 1110 - protein, 7 aa, synthetic construct
HTSRLQD

SEQ ID NO: 1111 - protein, 7 aa, synthetic construct
AASDLES

SEQ ID NO: 1112 - protein, 7 aa, synthetic construct
AASDLES

SEQ ID NO: 1113 - protein, 7 aa, synthetic construct
AASDLES

SEQ ID NO: 1114 - protein, 7 aa, synthetic construct
AKNNRPS

SEQ ID NO: 1115 - protein, 7 aa, synthetic construct
AASDLES

SEQ ID NO: 1116 - protein, 7 aa, synthetic construct
AASDLES

SEQ ID NO: 1117 - protein, 7 aa, synthetic construct
AKNNRPS

SEQ ID NO: 1118 - protein, 7 aa, synthetic construct
GASSRAT

SEQ ID NO: 1119 - protein, 7 aa, synthetic construct
AASDLES

SEQ ID NO: 1120 - protein, 7 aa, synthetic construct
DTSKVAS

SEQ ID NO: 1121 - protein, 7 aa, synthetic construct
AKNNRPS

SEQ ID NO: 1122 - protein, 7 aa, synthetic construct
RKSNRPS

SEQ ID NO: 1123 - protein, 7 aa, synthetic construct
WASDRES

SEQ ID NO: 1124 - protein, 7 aa, synthetic construct
AASDLES

SEQ ID NO: 1125 - protein, 7 aa, synthetic construct
AASDLES

SEQ ID NO: 1126 - protein, 7 aa, synthetic construct
QDFKRPS

SEQ ID NO: 1127 - protein, 7 aa, synthetic construct
RTSWLQS

SEQ ID NO: 1128 - protein, 7 aa, synthetic construct
AASDLES

SEQ ID NO: 1129 - protein, 7 aa, synthetic construct
AASDLES

SEQ ID NO: 1130 - protein, 7 aa, synthetic construct
AASDLES

SEQ ID NO: 1131 - protein, 7 aa, synthetic construct
AASDLES

SEQ ID NO: 1132 - protein, 7 aa, synthetic construct
RTSWLQS

SEQ ID NO: 1133 - protein, 7 aa, synthetic construct
AASDLES

SEQ ID NO: 1134 - protein, 7 aa, synthetic construct
GKNIRPS

SEQ ID NO: 1135 - protein, 7 aa, synthetic construct
WASDRES

SEQ ID NO: 1136 - protein, 7 aa, synthetic construct
AASDLES

SEQ ID NO: 1137 - protein, 7 aa, synthetic construct
DASNLQS

SEQ ID NO: 1138 - protein, 7 aa, synthetic construct
AASDLES

SEQ ID NO: 1139 - protein, 7 aa, synthetic construct
AASDLES

SEQ ID NO: 1140 - protein, 7 aa, synthetic construct
AASDLES

SEQ ID NO: 1141 - protein, 7 aa, synthetic construct
AASDLES

SEQ ID NO: 1142 - protein, 7 aa, synthetic construct
AASDLES

SEQ ID NO: 1143 - protein, 7 aa, synthetic construct
AKNNRPS

SEQ ID NO: 1144 - protein, 7 aa, synthetic construct
AASDLES

SEQ ID NO: 1145 - protein, 7 aa, synthetic construct
GQHNRPS

SEQ ID NO: 1146 - protein, 7 aa, synthetic construct
AASKLAS

SEQ ID NO: 1147 - protein, 7 aa, synthetic construct
HDNKRPS

SEQ ID NO: 1148 - protein, 7 aa, synthetic construct
AASDLES

SEQ ID NO: 1149 - protein, 7 aa, synthetic construct
GKNIRPS

SEQ ID NO: 1150 - protein, 7 aa, synthetic construct
AASDLES

SEQ ID NO: 1151 - protein, 7 aa, synthetic construct
AASDLES

SEQ ID NO: 1152 - protein, 7 aa, synthetic construct
AASDLES

SEQ ID NO: 1153 - protein, 7 aa, synthetic construct
AASDLES

SEQ ID NO: 1154 - protein, 7 aa, synthetic construct
AASDLES

SEQ ID NO: 1155 - protein, 7 aa, synthetic construct
AASDLES

SEQ ID NO: 1156 - protein, 7 aa, synthetic construct
AASDLES

SEQ ID NO: 1157 - protein, 7 aa, synthetic construct
AASDLES

SEQ ID NO: 1158 - protein, 7 aa, synthetic construct
AASDLES

SEQ ID NO: 1159 - protein, 7 aa, synthetic construct
AASDLES

SEQ ID NO: 1160 - protein, 7 aa, synthetic construct
AASDLES

SEQ ID NO: 1161 - protein, 7 aa, synthetic construct
GASTLQS

SEQ ID NO: 1162 - protein, 7 aa, synthetic construct
AASDLES

SEQ ID NO: 1163 - protein, 7 aa, synthetic construct
AASDLES

SEQ ID NO: 1164 - protein, 7 aa, synthetic construct
GKNIRPS

SEQ ID NO: 1165 - protein, 7 aa, synthetic construct
AASDLES

SEQ ID NO: 1166 - protein, 7 aa, synthetic construct
AASDLES

SEQ ID NO: 1167 - protein, 7 aa, synthetic construct
AASDLES

SEQ ID NO: 1168 - protein, 7 aa, synthetic construct
AASDLES

SEQ ID NO: 1169 - protein, 7 aa, synthetic construct
AASDLES

SEQ ID NO: 1170 - protein, 7 aa, synthetic construct
AASDLES

SEQ ID NO: 1171 - protein, 7 aa, synthetic construct
AATTLQS

SEQ ID NO: 1172 - protein, 7 aa, synthetic construct
GKNIRPS

SEQ ID NO: 1173 - protein, 7 aa, synthetic construct
AASDLES

SEQ ID NO: 1174 - protein, 7 aa, synthetic construct
AASDLES

SEQ ID NO: 1175 - protein, 7 aa, synthetic construct
GASSRAT

SEQ ID NO: 1176 - protein, 7 aa, synthetic construct
YTSSLHS

SEQ ID NO: 1177 - protein, 7 aa, synthetic construct
AASDLES

SEQ ID NO: 1178 - protein, 7 aa, synthetic construct
AASDLES

SEQ ID NO: 1179 - protein, 7 aa, synthetic construct
QDFKRPS

SEQ ID NO: 1180 - protein, 7 aa, synthetic construct
AASDLES

SEQ ID NO: 1181 - protein, 7 aa, synthetic construct
AASDLES

SEQ ID NO: 1182 - protein, 7 aa, synthetic construct
GTTSLES

SEQ ID NO: 1183 - protein, 7 aa, synthetic construct
FGSELRK

SEQ ID NO: 1184 - protein, 7 aa, synthetic construct
AASDLES

SEQ ID NO: 1185 - protein, 7 aa, synthetic construct
HTSRLQS

SEQ ID NO: 1186 - protein, 7 aa, synthetic construct
AASDLES

SEQ ID NO: 1187 - protein, 7 aa, synthetic construct
AKNNRPS

SEQ ID NO: 1188 - protein, 7 aa, synthetic construct
AASDLES

SEQ ID NO: 1189 - protein, 7 aa, synthetic construct
AASDLES

SEQ ID NO: 1190 - protein, 7 aa, synthetic construct
ETSKLAS

SEQ ID NO: 1191 - protein, 7 aa, synthetic construct
AASDLES

SEQ ID NO: 1192 - protein, 7 aa, synthetic construct
AASDLES

SEQ ID NO: 1193 - protein, 7 aa, synthetic construct
AASDLES

SEQ ID NO: 1194 - protein, 7 aa, synthetic construct
AKNNRPS

SEQ ID NO: 1195 - protein, 7 aa, synthetic construct
AASDLES

SEQ ID NO: 1196 - protein, 7 aa, synthetic construct
DASSSQS

SEQ ID NO: 1197 - protein, 7 aa, synthetic construct
AASDLES

SEQ ID NO: 1198 - protein, 7 aa, synthetic construct
AASDLES

SEQ ID NO: 1199 - protein, 7 aa, synthetic construct
AASDLES

SEQ ID NO: 1200 - protein, 7 aa, synthetic construct
AASDLES

SEQ ID NO: 1201 - protein, 7 aa, synthetic construct
AASDLES

SEQ ID NO: 1202 - protein, 7 aa, synthetic construct
GTTSLES

SEQ ID NO: 1203 - protein, 7 aa, synthetic construct
GTSYRYS

SEQ ID NO: 1204 - protein, 7 aa, synthetic construct
AASDLES

SEQ ID NO: 1205 - protein, 7 aa, synthetic construct
GKNIRPS

SEQ ID NO: 1206 - protein, 7 aa, synthetic construct
TASNLQN

SEQ ID NO: 1207 - protein, 7 aa, synthetic construct
AASDLES

SEQ ID NO: 1208 - protein, 7 aa, synthetic construct
HDNKRPS

SEQ ID NO: 1209 - protein, 7 aa, synthetic construct
STSSRAT

SEQ ID NO: 1210 - protein, 7 aa, synthetic construct
GASSLQS

SEQ ID NO: 1211 - protein, 7 aa, synthetic construct
AATSLQS

SEQ ID NO: 1212 - protein, 7 aa, synthetic construct
GASSLQS

SEQ ID NO: 1213 - protein, 7 aa, synthetic construct
DASSRAT

SEQ ID NO: 1214 - protein, 7 aa, synthetic construct
GASSLQS

SEQ ID NO: 1215 - protein, 7 aa, synthetic construct
AVSSLQS

SEQ ID NO: 1216 - protein, 7 aa, synthetic construct
GASSLQS

SEQ ID NO: 1217 - protein, 7 aa, synthetic construct
AASSLQS

SEQ ID NO: 1218 - protein, 7 aa, synthetic construct
GASSLQS

SEQ ID NO: 1219 - protein, 7 aa, synthetic construct
TASSLQS

SEQ ID NO: 1220 - protein, 7 aa, synthetic construct
GASSLQS

SEQ ID NO: 1221 - protein, 7 aa, synthetic construct
TTSSLQS

SEQ ID NO: 1222 - protein, 7 aa, synthetic construct
AASSLQS

SEQ ID NO: 1223 - protein, 7 aa, synthetic construct
STSSRAT

SEQ ID NO: 1224 - protein, 7 aa, synthetic construct
GATSLQS

SEQ ID NO: 1225 - protein, 7 aa, synthetic construct
GATSLQS

SEQ ID NO: 1226 - protein, 7 aa, synthetic construct
SASSLQS

SEQ ID NO: 1227 - protein, 7 aa, synthetic construct
GASSRAT

SEQ ID NO: 1228 - protein, 7 aa, synthetic construct
GASSLQS

SEQ ID NO: 1229 - protein, 7 aa, synthetic construct
GASSRAT

SEQ ID NO: 1230 - protein, 11 aa, synthetic construct
CQQGHTLPWTF

SEQ ID NO: 1231 - protein, 11 aa, synthetic construct [sequence omitted]

SEQ ID NO: 1232 - protein, 11 aa, synthetic construct
CQQGHTLPWTF

SEQ ID NO: 1233 - protein, 11 aa, synthetic construct
CQQGHTLPWTF

SEQ ID NO: 1234 - protein, 11 aa, synthetic construct
CQQGHTLPWTF

SEQ ID NO: 1235 - protein, 11 aa, synthetic construct
CQQGHTLPWTF

SEQ ID NO: 1236 - protein, 15 aa, synthetic construct
CQGSYYSGSGWYYAF

SEQ ID NO: 1237 - protein, 11 aa, synthetic construct
CQQGHTLPWTF

SEQ ID NO: 1238 - protein, 11 aa, synthetic construct
CQQGHTLPWTF

SEQ ID NO: 1239 - protein, 11 aa, synthetic construct
CQQGHTLPWTF

SEQ ID NO: 1240 - protein, 11 aa, synthetic construct
CQQGHTLPWTF

SEQ ID NO: 1241 - protein, 14 aa, synthetic construct
CATRAVRGNPHVLF

SEQ ID NO: 1242 - protein, 11 aa, synthetic construct
CGQGVLWPATF

SEQ ID NO: 1243 - protein, 10 aa, synthetic construct
CHQWSSYPTF

SEQ ID NO: 1244 - protein, 13 aa, synthetic construct
CSSWAGSRSGTVF

SEQ ID NO: 1245 - protein, 11 aa, synthetic construct [sequence omitted]

SEQ ID NO: 1246 - protein, 11 aa, synthetic construct [sequence omitted]

SEQ ID NO: 1247 - protein, 11 aa, synthetic construct [sequence omitted]

SEQ ID NO: 1248 - protein, 11 aa, synthetic construct
CQQGHTLPWTF

SEQ ID NO: 1249 - protein, 11 aa, synthetic construct
CQQGHTLPWTF

SEQ ID NO: 1250 - protein, 11 aa, synthetic construct
CQQGHTLPWTF

SEQ ID NO: 1251 - protein, 11 aa, synthetic construct
CQQGHTLPWTF

SEQ ID NO: 1252 - protein, 11 aa, synthetic construct
CQQGHTLPWTF

SEQ ID NO: 1253 - protein, 11 aa, synthetic construct
CQQGHTLPWTF

SEQ ID NO: 1254 - protein, 11 aa, synthetic construct
CQQTALVPYTF

SEQ ID NO: 1255 - protein, 11 aa, synthetic construct
CAQGAALPRTF

SEQ ID NO: 1256 - protein, 11 aa, synthetic construct
CQQGHTLPWTF

SEQ ID NO: 1257 - protein, 11 aa, synthetic construct
CFQGSHIPYTF

SEQ ID NO: 1258 - protein, 11 aa, synthetic construct [sequence omitted]

SEQ ID NO: 1259 - protein, 11 aa, synthetic construct [sequence omitted]

SEQ ID NO: 1260 - protein, 11 aa, synthetic construct
CQQTATWPFTF

SEQ ID NO: 1261 - protein, 11 aa, synthetic construct
CQQGHTLPWTF

SEQ ID NO: 1262 - protein, 11 aa, synthetic construct
CQQGHTLPWTF

SEQ ID NO: 1263 - protein, 11 aa, synthetic construct
CHQRSSYPWTF

SEQ ID NO: 1264 - protein, 14 aa, synthetic construct
CVARAVRGNPHVLF

SEQ ID NO: 1265 - protein, 11 aa, synthetic construct
CQQGHTLPWTF

SEQ ID NO: 1266 - protein, 11 aa, synthetic construct
CQQGHTLPWTF

SEQ ID NO: 1267 - protein, 11 aa, synthetic construct
CQQGHTLPWTF

SEQ ID NO: 1268 - protein, 11 aa, synthetic construct
CQQGHTLPWTF

SEQ ID NO: 1269 - protein, 11 aa, synthetic construct
CQQRSSYPPTF

SEQ ID NO: 1270 - protein, 11 aa, synthetic construct
CQQGHTLPWTF

SEQ ID NO: 1271 - protein, 11 aa, synthetic construct [sequence omitted]

SEQ ID NO: 1272 - protein, 11 aa, synthetic construct [sequence omitted]

SEQ ID NO: 1273 - protein, 11 aa, synthetic construct
CQQGHTLPWTF

SEQ ID NO: 1274 - protein, 11 aa, synthetic construct [sequence omitted]

SEQ ID NO: 1275 - protein, 11 aa, synthetic construct
CQQGHTLPWTF

SEQ ID NO: 1276 - protein, 11 aa, synthetic construct
CQQGHTLPWTF

SEQ ID NO: 1277 - protein, 11 aa, synthetic construct
CQQGHTLPWTF

SEQ ID NO: 1278 - protein, 11 aa, synthetic construct
CQQGHTLPWTF

SEQ ID NO: 1279 - protein, 11 aa, synthetic construct
CQQGHTLPWTF

SEQ ID NO: 1280 - protein, 11 aa, synthetic construct [sequence omitted]

SEQ ID NO: 1281 - protein, 11 aa, synthetic construct
CQQGHTLPWTF

SEQ ID NO: 1282 - protein, 11 aa, synthetic construct [sequence omitted]

SEQ ID NO: 1283 - protein, 11 aa, synthetic construct
CQQVVWRPFTF

SEQ ID NO: 1284 - protein, 11 aa, synthetic construct
CQQDAFHPPTF

SEQ ID NO: 1285 - protein, 11 aa, synthetic construct
CQQGHTLPWTF

SEQ ID NO: 1286 - protein, 11 aa, synthetic construct [sequence omitted]

SEQ ID NO: 1287 - protein, 11 aa, synthetic construct
CQQGHTLPWTF

SEQ ID NO: 1288 - protein, 11 aa, synthetic construct
CQQGHTLPWTF

SEQ ID NO: 1289 - protein, 11 aa, synthetic construct
CQQGHTLPWTF

SEQ ID NO: 1290 - protein, 11 aa, synthetic construct
CQQGHTLPWTF

SEQ ID NO: 1291 - protein, 11 aa, synthetic construct
CQQGHTLPWTF

SEQ ID NO: 1292 - protein, 11 aa, synthetic construct
CQQGHTLPWTF

SEQ ID NO: 1293 - protein, 11 aa, synthetic construct
CQQGHTLPWTF

SEQ ID NO: 1294 - protein, 11 aa, synthetic construct
CQQGHTLPWTF

SEQ ID NO: 1295 - protein, 11 aa, synthetic construct
CQQGHTLPWTF

SEQ ID NO: 1296 - protein, 11 aa, synthetic construct
CQQGHTLPWTF

SEQ ID NO: 1297 - protein, 11 aa, synthetic construct
CQQGHTLPWTF

SEQ ID NO: 1298 - protein, 11 aa, synthetic construct
CQQSYENPLTF

SEQ ID NO: 1299 - protein, 11 aa, synthetic construct
CQQGHTLPWTF

SEQ ID NO: 1300 - protein, 11 aa, synthetic construct
CQQGHTLPWTF

SEQ ID NO: 1301 - protein, 11 aa, synthetic construct [sequence omitted]

SEQ ID NO: 1302 - protein, 11 aa, synthetic construct
CQQGHTLPWTF

SEQ ID NO: 1303 - protein, 11 aa, synthetic construct
CQQGHTLPWTF

SEQ ID NO: 1304 - protein, 11 aa, synthetic construct
CQQGHTLPWTF

SEQ ID NO: 1305 - protein, 11 aa, synthetic construct
CQQGHTLPWTF

SEQ ID NO: 1306 - protein, 11 aa, synthetic construct
CQQYASVPVTF

SEQ ID NO: 1307 - protein, 11 aa, synthetic construct
CQQGHTLPWTF

SEQ ID NO: 1308 - protein, 11 aa, synthetic construct [sequence omitted]

SEQ ID NO: 1309 - protein, 11 aa, synthetic construct
CQQGYRWPVTF

SEQ ID NO: 1310 - protein, 11 aa, synthetic construct
CQQGHTLPWTF

SEQ ID NO: 1311 - protein, 11 aa, synthetic construct
CQQGHTLPWTF

SEQ ID NO: 1312 - protein, 14 aa, synthetic construct
CMSRSIWGNPHVLF

SEQ ID NO: 1313 - protein, 14 aa, synthetic construct
CATRAVRGNPHVLF

SEQ ID NO: 1314 - protein, 11 aa, synthetic construct
CQQGHTLPWTF

SEQ ID NO: 1315 - protein, 11 aa, synthetic construct
CQQGHTLPWTF

SEQ ID NO: 1316 - protein, 11 aa, synthetic construct
CQQYHDFPLTF

SEQ ID NO: 1317 - protein, 11 aa, synthetic construct
CQQGHTLPWTF

SEQ ID NO: 1318 - protein, 11 aa, synthetic construct
CQQGHTLPWTF

SEQ ID NO: 1319 - protein, 11 aa, synthetic construct
CQQGYTLPWTF

SEQ ID NO: 1320 - protein, 11 aa, synthetic construct
CQNGHSFPLTF

SEQ ID NO: 1321 - protein, 11 aa, synthetic construct
CQQGHTLPWTF

SEQ ID NO: 1322 - protein, 11 aa, synthetic construct
CQQFAYFPATF

SEQ ID NO: 1323 - protein, 11 aa, synthetic construct
CQQGHTLPWTF

SEQ ID NO: 1324 - protein, 11 aa, synthetic construct [sequence omitted]

SEQ ID NO: 1325 - protein, 11 aa, synthetic construct
CQQGHTLPWTF

SEQ ID NO: 1326 - protein, 11 aa, synthetic construct
CQQGHTLPWTF

SEQ ID NO: 1327 - protein, 11 aa, synthetic construct
CQQGHTLPWTF

SEQ ID NO: 1328 - protein, 11 aa, synthetic construct [sequence omitted]

SEQ ID NO: 1329 - protein, 11 aa, synthetic construct
CQQGHTLPWTF

SEQ ID NO: 1330 - protein, 11 aa, synthetic construct
CQQGHTLPWTF

SEQ ID NO: 1331 - protein, 11 aa, synthetic construct [sequence omitted]

SEQ ID NO: 1332 - protein, 11 aa, synthetic construct
CQQGHTLPWTF

SEQ ID NO: 1333 - protein, 11 aa, synthetic construct [sequence omitted]

SEQ ID NO: 1334 - protein, 11 aa, synthetic construct
CQQGHTLPWTF

SEQ ID NO: 1335 - protein, 11 aa, synthetic construct
CQQGHTLPWTF

SEQ ID NO: 1336 - protein, 11 aa, synthetic construct
CQQGHTLPWTF

SEQ ID NO: 1337 - protein, 11 aa, synthetic construct
CQQGHTLPWTF

SEQ ID NO: 1338 - protein, 11 aa, synthetic construct
CQQGHTLPWTF

SEQ ID NO: 1339 - protein, 11 aa, synthetic construct
CQQGHTLPWTF

SEQ ID NO: 1340 - protein, 11 aa, synthetic construct
CQQNLAPPYTF

SEQ ID NO: 1341 - protein, 11 aa, synthetic construct
CQQGHTLPWTF

SEQ ID NO: 1342 - protein, 11 aa, synthetic construct
CQQNLAPPYTF

SEQ ID NO: 1343 - protein, 11 aa, synthetic construct
CQQSNSWPYTF

SEQ ID NO: 1344 - protein, 11 aa, synthetic construct
CQQGHTLPWTF

SEQ ID NO: 1345 - protein, 11 aa, synthetic construct
CQQGYTLPWTF

SEQ ID NO: 1346 - protein, 13 aa, synthetic construct
CQQSASAHPGWTF

SEQ ID NO: 1347 - protein, 11 aa, synthetic construct
CQQGYRAPWTF

SEQ ID NO: 1348 - protein, 11 aa, synthetic construct [sequence omitted]

SEQ ID NO: 1349 - protein, 11 aa, synthetic construct
CQQSYRVPRSF

SEQ ID NO: 1350 - protein, 12 aa, synthetic construct
CQHFGGSPLLTF

SEQ ID NO: 1351 - protein, 10 aa, synthetic construct
CQQTYSPVTF

SEQ ID NO: 1352 - protein, 11 aa, synthetic construct
CQQGFYTPWTF

SEQ ID NO: 1353 - protein, 11 aa, synthetic construct
CQQGYRAPWTF

SEQ ID NO: 1354 - protein, 11 aa, synthetic construct
CHQSYGIPWTF

SEQ ID NO: 1355 - protein, 11 aa, synthetic construct
CQQSYRSFFTF

SEQ ID NO: 1356 - protein, 11 aa, synthetic construct
CQQSYGNVWTF

SEQ ID NO: 1357 - protein, 11 aa, synthetic construct
CQQGYRAPWTF

SEQ ID NO: 1358 - protein, 11 aa, synthetic construct
CLQAYSTPWTF

SEQ ID NO: 1359 - protein, 11 aa, synthetic construct
CQQSHQTPWTF

SEQ ID NO: 1360 - protein, 11 aa, synthetic construct
CQQSGSSSLTF

SEQ ID NO: 1361 - protein, 12 aa, synthetic construct
CQQSYIMSQWTF

SEQ ID NO: 1362 - protein, 11 aa, synthetic construct
CQQGFRAPRTF

SEQ ID NO: 1363 - protein, 11 aa, synthetic construct
CQQSHATPWTF

SEQ ID NO: 1364 - protein, 13 aa, synthetic construct
CQLFDRSRPGYTF

SEQ ID NO: 1365 - protein, 11 aa, synthetic construct
CQQGYRAPWTF

SEQ ID NO: 1366 - protein, 12 aa, synthetic construct
CQQYKRSSGFTF

SEQ ID NO: 1367 - protein, 119 aa, synthetic construct
EVQLVESGGGLVQAGGSLRLSCAASGRTFSNYAMGWFRQAPGKEREFVAAITWSGTRTDYADSVKGRFTISADNAKNTVYLQMNSLKPEDTAVYYCAAAAWTIYEYDYWGQGTQVTVSS

SEQ ID NO: 1368 - protein, 118 aa, synthetic construct
EVQLVESGGGLVQAGGSLRLSCAASGRTFDIYAMGWFRQAPGKEREWVSTISWSGGRTYYADSVKGRFTISADNAKNTVYLQMNSLKPEDTAVYYCAARPVYRTYGSWGQGTQVTVSS

SEQ ID NO: 1369 - protein, 119 aa, synthetic construct
EVQLVESGGGLVQAGGSLRLSCAASGFTFSSYAMGWFRQAPGKEREFVAAITWSGTRTDYADSVKGRFTISADNAKNTVYLQMNSLKPEDTAVYYCAAAAWRYSEYDYWGQGTQVTVSS

SEQ ID NO: 1370 - protein, 117 aa, synthetic construct
EVQLVESGGGLVQAGGSLRLSCAASGSTFDTYVMGWFRQAPGKERELVSTISSDGDSTYYADSVKGRFTISADNAKNTVYLQMNSLKPEDTAVYYCAAGTRRGRNYWGQGTQVTVSS

SEQ ID NO: 1371 - protein, 118 aa, synthetic construct
EVQLVESGGGLVQAGGSLRLSCAASGRTFSIYAMGWFRQAPGKEREWVATISSSGDRTYYADSVKGRFTISADNAKNTVYLQMNSLKPEDTAVYYCAARRYGRRYDYWGQGTQVTVSS

SEQ ID NO: 1372 - protein, 118 aa, synthetic construct
EVQLVESGGGLVQAGGSLRLSCAASGGTFRSYVMGWFRQAPGKEREWVATINSSGSRTYYADSVKGRFTISADNAKNTVYLQMNSLKPEDTAVYYCAARPNYRDYEYWGQGTQVTVSS

SEQ ID NO: 1373 - protein, 119 aa, synthetic construct; identical to SEQ ID NO: 35

SEQ ID NO: 1374 - protein, 120 aa, synthetic construct
EVQLVESGGGLVQAGGSLRLSCAASGRTLDDYVMGWFRQAPGKEREGVATISGGGDTTYYADSVKGRFTISADNAKNTVYLQMNSLKPEDTAVYYCAAVPWRWTTRRDYWGQGTQVTVSS

SEQ ID NO: 1375 - protein, 119 aa, synthetic construct
EVQLVESGGGLVQAGGSLRLSCAASGFTFDNYAMGWFRQAPGKEREFVSSITWSGGRTSYADSVKGRFTISADNAKNTVYLQMNSLKPEDTAVYYCAANAWTIYRYDYWGQGTQVTVSS

SEQ ID NO: 1376 - protein, 124 aa, synthetic construct; identical to SEQ ID NO: 36

SEQ ID NO: 1377 - protein, 122 aa, synthetic construct
EVQLVESGGGLVQAGGSLRLSCAASGRTLSSYAMGWFRQAPGKEREFVASITWGGGRTYYADSVKGRFTISADNAKNTVYLQMNSLKPEDTAVYYCATRLWGTWTAGDYDYWGQGTQVTVSS

SEQ ID NO: 1378 - protein, 119 aa, synthetic construct
EVQLVESGGGLVQAGGSLRLSCAASGSTFSSYAMGWFRQAPGKEREFVAAITWSGTRTNYADSVKGRFTISADNAKNTVYLQMNSLKPEDTAVYYCAAAAWTIYTYDSWGQGTQVTVSS

SEQ ID NO: 1379 - protein, 119 aa, synthetic construct
EVQLVESGGGLVQAGGSLRLSCAASGFIFSNYAMGWFRQAPGKEREFVAAITWSGGRTYYADSVKGRFTISADNAKNTVYLQMNSLKPEDTAVYYCAAAAWTIYEYDYWGQGTQVTVSS

SEQ ID NO: 1380 - protein, 118 aa, synthetic construct
EVQLVESGGGLVQAGGSLRLSCAASGFTFSDYVMGWFRQAPGKEREFVSAISWSGTNTNYADSVKGRFTISADNAKNTVYLQMNSLKPEDTAVYYCATRALRDGRGYWGQGTQVTVSS

SEQ ID NO: 1381 - protein, 119 aa, synthetic construct
EVQLVESGGGLVQAGGSLRLSCAASGRTFDSYAMGWFRQAPGKEREGVATISGSGGRTYYADSVKGRFTISADNAKNTVYLQMNSLKPEDTAVYYCAAAAWTIYEFDSWGQGTQVTVTS

SEQ ID NO: 1382 - protein, 118 aa, synthetic construct
EVQLVESGGGLVQAGGSLRLSCAASGSIFSIYAMGWFRQAPGKEREWVATISWGGNSTYYADSVKGRFTISADNAKNTVYLQMNSLKPEDTAVYYCAARPRFRTYGYWGQGTQVTVSS

SEQ ID NO: 1383 - protein, 117 aa, synthetic construct
EVQLVESGGGLVQAGGSLRLSCAASGSTLSIYAMGWFRQAPGKERELVATISSGGGSTYYADSVKGRFTISADNAKNTVYLQMNSLKPEDTAVYYCAAGSVYGRNYWGQGTQVTVSS

SEQ ID NO: 1384 - protein, 122 aa, synthetic construct
EVQLVESGGGLVQAGGSLRLSCAASGSTFSNYAMGWFRQAPGKEREFVSAINSSGSRTYYADSVKGRFTISADNAKNTVYLQMNSLKPEDTAVYYCAARLWGTWTAGDYDYWGQGTQVTVSS

SEQ ID NO: 1385 - protein, 119 aa, synthetic construct
EVQLVESGGGLVQAGGSLRLSCAASGRTFSSYAMGWFRQAPGKEREFVATISGSFGRTYYADSVKGRFTISADNAKNTVYLQMNSLKPEDTAVYYCAAGAWTIYEYDYWGQGTQVTVSS

SEQ ID NO: 1386 - protein, 117 aa, synthetic construct
EVQLVESGGGLVQAGGSLRLSCAASGSTFSIYAMGWFRQAPGKERELVASISWSGDTTNYADSVKGRFTISADNAKNTVYLQMNSLKPEDTAVYYCAAGSVYGRNSWGQGTQVTVTS

SEQ ID NO: 1387 - protein, 119 aa, synthetic construct
EVQLVESGGGLVQAGGSLRLSCAASGSTFSNYAMGWFRQAPGKERELVSAITWSSSRTYYADSVKGRFTISADNAKNTVYLQMNSLKPEDTAVYYCAAAAWTIYNFEYWGQGTQVTVSS

SEQ ID NO: 1388 - protein, 122 aa, synthetic construct
EVQLVESGGGLVQAGGSLRLSCAASGSILSSYTMGWFRQAPGKEREFVSTISRSSTRTYYADSVKGRFTISADNAKNTVYLQMNSLKPEDTAVYYCAARLWGTWTAGDYDYWGQGTQVTVSS

SEQ ID NO: 1389 - protein, 117 aa, synthetic construct
EVQLVESGGGLVQAGGSLRLSCAASGSTFDIYAMGWFRQAPGKEREFVASISSGDTNTNYADSVKGRFTISADNAKNTVYLQMNSLKHEDTAVYYCAAGRYSGYNSWGQGTQVTVSS

SEQ ID NO: 1390 - protein, 117 aa, synthetic construct
EVQLVESGGGLVQAGGSLRLSCAASGRTFDTYAMGWLRQAPGKEREFVSAISTGDGSTNYADSVKGRFTISADNAKNTVYLQMNSLKPEDTAVYYCAAARRSGRGSWGQGTQVTVTS

SEQ ID NO: 1391 - protein, 119 aa, synthetic construct
EVQLVESGGGLVQAGGSLRLSCAASGFTFDNYAMGWFRQAPGKEREGVAAITWSGGRTYYADSVKGRFTISADNAKNTVYLQMNSLKPEDTAVYYCAAAAWTIYEYDSWGQGTQVTVTS

SEQ ID NO: 1392 - protein, 119 aa, synthetic construct
EVQLVESGGGLVQAGGSLRLSCAASGFTFDNYAMGWFRQAPGKEREFVATITWSGTRTNYADSVKGRFTISADNAKNTVYLQMNSLKPEDTAVYYCAAAAWTIYDYDYWGQGTQVTVSS

SEQ ID NO: 1393 - protein, 119 aa, synthetic construct
EVQLVESGGGLVQAGGSLRLSCAASGRTFSNNVMGWFRQAPGKEREFVAAISWGGASTNYADSVKGRFTISADNAKNTVYLQMNSLKPEDTAVYYCAAGPKTPDTRNYWGQGTQVTVSS

SEQ ID NO: 1394 - protein, 118 aa, synthetic construct
EVQLVESGGGLVQAGGSLRLSCAASGFIFDSYAMGWFRQAPGKEREFVAAISWGGSNTNYADSVKGRFTISADNAKNTVYLQMNSLKPEDTAVYYCAAVRITDGRDYWGQGTQVTVSS

SEQ ID NO: 1395 - protein, 119 aa, synthetic construct; identical to SEQ ID NO: 1367

SEQ ID NO: 1396 - protein, 119 aa, synthetic construct; identical to SEQ ID NO: 1369

SEQ ID NO: 1397 - protein, 118 aa, synthetic construct
EVQLVESGGGLVQAGGSLRLSCAASGFTFSIYAMGWFRQAPGKEREWVSTISWSGGNTYYADSVKGRFTISADNAKNTVYLQMNSLKPEDTAVYYCATRPRFRRYDSWGQGTQVTVSS

SEQ ID NO: 1398 - protein, 123 aa, synthetic construct
EVQLVESGGGLVQAGGSLRLSCAASGSTFDSYAMGWFRQAPGKEREGVAAITTSGSSTYYADSVKGRFTISADNAKNTVYLQMNSLKPEDTAVYYCAARGGVRSGSPGTYNYWGQGTQVTVSS

SEQ ID NO: 1399 - protein, 119 aa, synthetic construct
EVQLVESGGGLVQAGGSLRLSCAASGFIFSTYAMGWFRQAPGKERELVSAITRSGITTYYADSVKGRFTISADNAKNTVYLQMNSLKPEDTAVYYCAAAAWTIYEYDYWGQGTQVTVSS

SEQ ID NO: 1400 - protein, 122 aa, synthetic construct
EVQLVESGGGLVQAGGSLRLSCAASGFTFRNYAMGWFRQAPGKEREFVSSISSSSSRTSYADSVKGRFTISADNAKNTVYLQMNSLKPEDTAVYYCAARLWGTWTAGDYDYWGQGTQVTVSS

SEQ ID NO: 1401 - protein, 118 aa, synthetic construct
EVQLVESGGGLVQAGGSLRLSCAASGRIFSIYTMGWFRQAPGKEREWVATINSSGSRTYYADSVKGRFTISADNAKNTVYLQMNSLKPEDTAVYYCAARPSYNRYDSWGQGTQVTVSS

SEQ ID NO: 1402 - protein, 119 aa, synthetic construct
EVQLVESGGGLVQAGGSLRLSCAASGFTFSSYAMGWFRQAPGKEREFVASITWSGTSTNYADSVKGRFTISADNAKNTVYLQMNSLKPEDTAVYYCAAAAWTIYAYDYWGQGTQVTVSS

SEQ ID NO: 1403 - protein, 119 aa, synthetic construct
EVQLVESGGGLVQAGGSLRLSCAASGRTFSNYAMGWFRQAPGKEREFVAGISWSGTRTYYADSVKGRFTISADNAKNTVYLQMNSLKPEDTAVYYCAAAAWTIYEYDYWGQGTQVTVSS

SEQ ID NO: 1404 - protein, 116 aa, synthetic construct
EVQLVESGGGLVQAGGSLRLSCAASGSTFSSYAMGWFRQAPGKEREFVSAISRNGASTSYADSVKGRFTISADNAKNTVYLQMNSLKPEDTAVYYCAAAGTRFDYWGQGTQVTVSS

SEQ ID NO: 1405 - protein, 120 aa, synthetic construct; identical to SEQ ID NO: 1374

SEQ ID NO: 1406 - protein, 119 aa, synthetic construct; identical to SEQ ID NO: 1392

SEQ ID NO: 1407 - protein, 119 aa, synthetic construct
EVQLVESGGGLVQAGGSLRLSCAASGRTFSTNAMGWFRQAPGKEREWVTAITTSGGNTYYADSVKGRFTISADNAKNTVYLQMNSLKPEDTAVYYCAARDETYGTYDYWGQGTQVTVSS

SEQ ID NO: 1408 - protein, 122 aa, synthetic construct
EVQLVESGGGLVQAGGSLRLSCAASGSTFSTYAMGWFRQAPGKEREFVATISTSSSRTYYADSVKGRFTISADNAKNTVYLQMNSLKPEDTAVYYCAARLWGTWTAGDYDYWGQGTQVTVSL

SEQ ID NO: 1409 - protein, 118 aa, synthetic construct
EVQLVESGGGLVQAGGSLRLSCAASGRTFDSYAMGWFRQAPGKEREWVSAISWSGSSTYYADSVKGRFTISADNAKNTVYLQMNSLKPEDTAVYYCAARGGYGRYDSWGQGTQVTVTS

SEQ ID NO: 1410 - protein, 119 aa, synthetic construct
EVQLVESGGGLVQAGGSLRLSCAASGFTFDNYAMGWFRQAPGKEREFVATITWSGTTTNYADSVKGRFTISADNAKNTVYLQMNSLKPEDTAVYYCAAAAWTIYDYDYWGQGTQVTVSS

SEQ ID NO: 1411 - protein, 119 aa, synthetic construct
EVQLVESGGGLVQAGGSLRLSCAASGFTFSSYAMGWFRQAPGKEREFVASITWSGTRTDYADSVKGRFTISADNAKNTVYLQMNSLKPEDTAVYYCAAAAWTIYGYEYWGQGTQVTVSS

SEQ ID NO: 1412 - protein, 117 aa, synthetic construct
EVQLVESGGGLVQAGGSLRLSCAASGSTFDIYAMGWFRQAPGKEREFVASISSGDTNTYYADSVKGRFTISADNAKNTVYLQMNSLKHEDTAVYYCAAGRYSGYNSWGQGTQVTVSS

SEQ ID NO: 1413 - protein, 127 aa, synthetic construct
EVQLVESGGGLVQAGGSLRLSCAASGSTLSSYAMGWFRQAPGKERELVAAITGSGGRTYYADSVKGRFTISADNAKNTVYLQMNSLKPEDTAVYYCAANRRYSFPYWSFWYDDFDYWGQGTQVTVSS

SEQ ID NO: 1414 - protein, 118 aa, synthetic construct
EVQLVESGGGLVQAGGSLRLSCAASGFAFSSYWMGWFRQAPGKERELVAARNSGGNTNYADSVKGRFTISADNAKNTVYLQMNSLKPEDTAVYYCAADVWYGSTWRNWGQGTQVTVSS

SEQ ID NO: 1415 - protein, 116 aa, synthetic construct
EVQLVESGGGLVQAGGSLRLSCAASGRTFGDYIMGWFRQAPGKERELVATISGGGSTNYADSVKGRFTISADNAKNTVYLQMNSLKPEDTAVYYCAAVFSRGPLTWGQGTQVTVSS

SEQ ID NO: 1416 - protein, 116 aa, synthetic construct
EVQLVESGGGLVQAGGSLRLSCAASGNIFSRYIMGWFRQAPGKEREWVAGISNGGTTKYADSVKGRFTISADNAKNTVYLQMNSLKPEDTAVYYCAQGWKIRPTIWGQGTQVTVSS

SEQ ID NO: 1417 - protein, 118 aa, synthetic construct
EVQLVESGGGLVQAGGSLRLSCAASGFTFSTHWMGWFRQAPGKERELVAARNSGGNTNYADSVKGRFTISADNAKNTVYLQMNSLKPEDTAVYYCAADVWYGSTWRNWGQGTQVTVSS

SEQ ID NO: 1418 - protein, 123 aa, synthetic construct
EVQLVESGGGLVQAGGSLRLSCAASGGTFRNYGMGWFRQAPGKERELVAAISWSGVSTIYADSVKGRFTISADNAKNTVYLQMNSLKPEDTAVYYCASSPYGPLYRSTHYYDWGQGTQVTVSS

SEQ ID NO: 1419 - protein, 115 aa, synthetic construct
EVQLVESGGGLVQAGGSLRLSCAASGRFSRINSMGWFRQAPGKERELVAHIFRSGITSYASYADSVKGRFTISADNAKNTVYLQMNSLKPEDTAVYYCAIGRGSWGQGTQVTVSS

SEQ ID NO: 1420 - protein, 116 aa, synthetic construct
EVQLVESGGGLVQAGGSLRLSCAASGIPASIRTMGWFRQAPGKEREGISLITSDDGSTYYADSVKGRFTISADNAKNTVYLQMNSLKPEDTAVYYCAWTTNRGMDWGQGTQVTVSS

SEQ ID NO: 1421 - protein, 118 aa, synthetic construct
EVQLVESGGGLVQAGGSLRLSCAASGFTMSSSWMGWFRQAPGKEREFVATLTSGGSTNYADSVKGRFTISADNAKNTVYLQMNSLKPEDTAVYYCAADVWYGSTWRNWGQGTQVTVSS

SEQ ID NO: 1422 - protein, 125 aa, synthetic construct
EVQLVESGGGLVQAGGSLRLSCAASGPISGINRMGWFRQAPGKEREWVSTITFNGDHTYYADSVKGRFTISADNAKNTVYLQMNSLKPEDTAVYYCAARPYTRPGSMWVSSLYDWGQGTQVTVSS

SEQ ID NO: 1423 - protein, 118 aa, synthetic construct
EVQLVESGGGLVQAGGSLRLSCAASVRTFSLSDMGWFRQAPGKEREFVGAINWLSESTYYADSVKGRFTISADNAKNTVYLQMNSLKPEDTAVYYCAAQGGVLSGWDWGQGTQVTVSS

SEQ ID NO: 1424 - protein, 116 aa, synthetic construct
EVQLVESGGGLVQAGGSLRLSCAASGSITSIRSMGWFRQAPGKEREWVSSVYIFGGSTYYADSVKGRFTISADNAKNTVYLQMNSLKPEDTAVYYCANSNKPKFDWGQGTQVTVSS

SEQ ID NO: 1425 - protein, 116 aa, synthetic construct
EVQLVESGGGLVQAGGSLRLSCAASGRTFGDYIMGWFRQAPGKERELVASVSGGGNSDYADSVKGRFTISADNAKNTVYLQMNSLKPEDTAVYYCAAVFSRGPLTWGQGTQVTVSS

SEQ ID NO: 1426 - protein, 112 aa, synthetic construct
EVQLVESGGGLVQAGGSLRLSCAASGRTFSNYFMGWFRQAPGKERESVAAINWDSARTYYADSVKGRFTISADNAKNTVYLQMNSLKPEDTAVYYCASAGRWGQGTQVTVSS

SEQ ID NO: 1427 - protein, 121 aa, synthetic construct
EVQLVESGGGLVQAGGSLRLSCAASGPTFSIYDMGWFRQAPGKEREFVAAITWNSGRTNYADSVKGRFTISADNAKNTVYLQMNSLKPEDTAVYYCAAGAWSSLRKTAASWGQGTQVTVSS

SEQ ID NO: 1428 - protein, 119 aa, synthetic construct
EVQLVESGGGLVQAGGSLRLSCAASGFTFSGNWMGWFRQAPGKEREWVSGISSGGGRTYYADSVKGRFTISADNAKNTVYLQMNSLKPEDTAVYYCAADVWYGSTWRNWGQGTQVTVSS

SEQ ID NO: 1429 - protein, 113 aa, synthetic construct
EVQLVESGGGLVQAGGSLRLSCAASGFPFSEYPMGWFRQAPGKEREFVAVVNWNGDSTYYADSVKGRFTISADNAKNTVYLQMNSLKPEDTAVYYCANFNRDWGQGTQVTVSS

SEQ ID NO: 1430 - protein, 114 aa, synthetic construct
EVQLVESGGGLVQAGGSLRLSCAASGSIFNIGMGWFRQAPGKEREWVSSIYSNGHTYYADSVKGRFTISADNAKNTVYLQMNSLKPEDTAVYYCANSNKPKFDWGQGTQVTVSS

SEQ ID NO: 1431 - protein, 116 aa, synthetic construct
EVQLVESGGGLVQAGGSLRLSCAASGRAFSLRTMGWFRQAPGKEREGISLITSDDGSTYYADSVKGRFTISADNAKNTVYLQMNSLKPEDTAVYYCAWTTNRGMDWGQGTQVTVSS

SEQ ID NO: 1432 - protein, 118 aa, synthetic construct
EVQLVESGGGLVQAGGSLRLSCAASGRTFSSYAMMGWFRQAPGKEREFLAIITDGSKTLYADSVKGRFTISADNAKNTVYLQMNSLKPEDTAVYYCAAQFTLARHLVWGQGTQVTVSS

SEQ ID NO: 1433 - protein, 121 aa, synthetic construct
EVQLVESGGGLVQAGGSLRLSCAASGPTFSIYDMGWFRQAPGKEREFVAVINWSRGSTFYADSVKGRFTISADNAKNTVYLQMNSLKPEDTAVYYCAAGVWSSLRHTAANWGQGTQVTVSS

SEQ ID NO: 1434 - protein, 118 aa, synthetic construct
EVQLVESGGGLVQAGGSLRLSCAASGFTFSTSWMGWFRQAPGKERELVATINSGGGTNYADSVKGRFTISADNAKNTVYLQMNSLKPEDTAVYYCAADVWYGSTWRNWGQGTQVTVSS

SEQ ID NO: 1435 - protein, 119 aa, synthetic construct
EVQLVESGGGLVQAGGSLRLSCAASGFTLSGNWMGWFRQAPGKEREFVASISSSGVSKHYADSVKGRFTISADNAKNTVYLQMNSLKPEDTAVYYCAADVWYGSTWRNWGRGTQVTVSS

SEQ ID NO: 1436 - protein, 116 aa, synthetic construct
EVQLVESGGGLVQAGGSLRLSCAASGRAFRRYTMGWFRQAPGKEREFVAAIRWSGGTTFYADSVKGRFTISADNAKNTVYLQMNSLKPEDTAVYYCAAEWAAMKDWGQGTQVTVSS

SEQ ID NO: 1437 - protein, 116 aa, synthetic construct
EVQLVESGGGLVQAGGSLRLSCAASGNIFSRYIMGWFRQAPGKEREWVAGISNGGTTKYADSVKGRFTISADNAKNTVYLQMNSLKPEDTAVYYCAQGWKIIPTDWGQGTQVTVSS

SEQ ID NO: 1438 - protein, 121 aa, synthetic construct
EVQLVESGGGLVQAGGSLRLSCAASGPTFSIYDMGWFRQAPGKEREFVASTIWSRGDTYYADSVKGRFTISADNAKNTVYLQMNSLKPEDTAVYYCAAGVWSSLRHTAANWGQGTQVTVSS

SEQ ID NO: 1439 - protein, 115 aa, synthetic construct
EVQLVESGGGLVQAGGSLRLSCAASGRTYYAMGWFRQAPGKEREFLAIITDGSKTLYADSVKGRFTISADNAKNTVYLQMNSLKPEDTAVYYCAAQFTLARHLVWGQGTQVTVSS

SEQ ID NO: 1440 - protein, 118 aa, synthetic construct
EVQLVESGGGLVQAGGSLRLSCAASGFTFSTSWMGWFRQAPGKEREFVAGILSDGRELYADSVKGRFTISADNAKNTVYLQMNSLKPEDTAVYYCAADVWYGSTWRNWGQGTQVTVSS

SEQ ID NO: 1441 - protein, 118 aa, synthetic construct
EVQLVESGGGLVQAGGSLRLSCAASGRTFESYRMGWFRQAPGKEREFVGGINWSGRTYYADSVKGRFTISADNAKNTVYLQMNSLKPEDTAVYYCAARRLYSGSYLDWGQGTQVTVSS

SEQ ID NO: 1442 - protein, 116 aa, synthetic construct
EVQLVESGGGLVQAGGSLRLSCAASGSSLSFNAMGWFRQAPGKEREWVSSVYIFGGSTYYADSVKGRFTISADNAKNTVYLQMNSLKPEDTAVYYCANSNKPKFDWGQGTQVTVSS

SEQ ID NO: 1443 - protein, 116 aa, synthetic construct; identical to SEQ ID NO: 37

SEQ ID NO: 1444 - protein, 117 aa, synthetic construct
EVQLVESGGGLVQAGGSLRLSCAASGPTFSWTMMGWFRQAPGKEREFLAIITDGSKTLYADSVKGRFTISADNAKNTVYLQMNSLKPEDTAVYYCAAQFTLARHLVWGQGTQVTVSS

SEQ ID NO: 1445 - protein, 116 aa, synthetic construct
EVQLVESGGGLVQAGGSLRLSCAASGIIGTIRTMGWFRQAPGKEREGISLITSDDGSTYYADSVKGRFTISADNAKNTVYLQMNSLKPEDTAVYYCAWTTNRGMDWGQGTQVTVSS

SEQ ID NO: 1446 - protein, 115 aa, synthetic construct
EVQLVESGGGLVQAGGSLRLSCAASGFTLENNMMGWFRQAPGKERELVSAIGWSGASTYYADSVKGRFTISADNAKNTVYLQMNSLKPEDTAVYYCAANLRGDNWGQGTQVTVSS

SEQ ID NO: 1447 - protein, 116 aa, synthetic construct
EVQLVESGGGLVQAGGSLRLSCAASGNIFSRYIMGWFRQAPGKEREWVAGISSGGTTKYADSVKGRFTISADNAKNTVYLQMNSLKPEDTAVYYCAQGWKIVPTNWGQGTQVTVSS

SEQ ID NO: 1448 - protein, 122 aa, synthetic construct
EVQLVESGGGLVQAGGSLRLSCAASGNIDRLYAMGWFRQAPGKEREGISLITSDDGSTYYADSVKGRFTISADNAKNTVYLQMNSLKPEDTAVYYCASSGPADARNGERWAWGQGTQVTVSS

SEQ ID NO: 1449 - protein, 116 aa, synthetic construct
EVQLVESGGGLVQAGGSLRLSCAASGSIASIHAIGWFRQAPGKEREWVSSVYIFGGSTYYADSVKGRFTISADNAKNTVYLQMNSLKPEDTAVYYCANSNKPKFDWGQGTQVTVSS

SEQ ID NO: 1450 - protein, 116 aa, synthetic construct
EVQLVESGGGLVQAGGSLRLSCAASGRTFSSKAMGWFRQAPGKEREWVSSVYIFGGSTYYADSVKGRFTISADNAKNTVYLQMNSLKPEDTAVYYCANSNKPKFDWGQGTQVTVSS

SEQ ID NO: 1451 - protein, 116 aa, synthetic construct
EVQLVESGGGLVQAGGSLRLSCAASGSIASFNAMGWFRQAPGKEREWVSSVYIFGGSTYYADSVKGRFTISADNAKNTVYLQMNSLKPEDTAVYYCANSNKPKFDWGQGTQVTVSS

SEQ ID NO: 1452 - protein, 118 aa, synthetic construct
EVQLVESGGGLVQAGGSLRLSCAASGFTFSTSWMGWFRQAPGKEREWVVGISSGGSTHYADSVKGRFTISADNAKNTVYLQMNSLKPEDTAVYYCAADVWYGSTWRNWGQGTQVTVSS

SEQ ID NO: 1453 - protein, 118 aa, synthetic construct
EVQLVESGGGLVQAGGSLRLSCAASGFTFSGNWMGWFRQAPGKEREWVVGISSGGSTHYADSVKGRFTISADNAKNTVYLQMNSLKPEDTAVYYCAADVWYGSTWRNWGQGTQVTVSS

SEQ ID NO: 1454 - protein, 118 aa, synthetic construct
EVQLVESGGGLVQAGGSLRLSCAASGRTFSSYAMMGWFRQAPGKEREFLAIITDGSKTLYADSVKGRFTISADNAKNTVYLQMNSLKPEDTAVYYCAAQFILARHLVWGQGTQVTVSS

SEQ ID NO: 1455 - protein, 115 aa, synthetic construct
EVQLVESGGGLVQAGGSLRLSCAASGITITTEVMGWFRQAPGKEREYVAAIHWNGDSTAYADSVKGRFTISADNAKNTVYLQMNSLKPEDTAVYYCAQVSQWRAWGQGTQVTVSS

SEQ ID NO: 1456 - protein, 118 aa, synthetic construct; identical to SEQ ID NO: 38

SEQ ID NO: 1457 - protein, 119 aa, synthetic construct
EVQLVESGGGLVQAGGSLRLSCAASGVTLDLYAMGWFRQAPGKEREFVAGIWRSGGSTVYADSVKGRFTISADNAKNTVYLQMNSLKPEDTAVYYCATWTTTWGRNRDWGQGTQVTVSS

SEQ ID NO: 1458 - protein, 113 aa, synthetic construct
EVQLVESGGGLVQAGGSLRLSCAASGGTFSGGFMGWFRQAPGKEREWVASVLRGGYTWYADSVKGRFTISADNAKNTVYLQMNSLKPEDTAVYYCANGGSSYWGQGTQVTVSS

SEQ ID NO: 1459 - protein, 117 aa, synthetic construct
EVQLVESGGGLVQAGGSLRLSCAASGRTFSTYASMWWFRQAPGKEREFLAIITDGSKTLYADSVKGRFTISADNAKNTVYLQMNSLKPEDTAVYYCAGSWSYPGLTWGQGTQVTVSS

SEQ ID NO: 1460 - protein, 118 aa, synthetic construct
EVQLVESGGGLVQAGGSLRLSCAASGFTMSSSWMGWFRQAPGKEREWVVGISSGGSTHYADSVKGRFTISADNAKNTVYLQMNSLKPEDTAVYYCAADVWYGSTWRNWGQGTQVTVSS

SEQ ID NO: 1461 - protein, 123 aa, synthetic construct
EVQLVESGGGLVQAGGSLRLSCAASGFPVNRYSMGWFRQAPGKERELVSAIGWSGASTYYADSVKGRFTISADNAKNTVYLQMNSLKPEDTAVYYCAADFWLARLRVADDYDWGQGTQVTVSS

SEQ ID NO: 1462 - protein, 116 aa, synthetic construct
EVQLVESGGGLVQAGGSLRLSCAASGNIFSRYIMGWFRQAPGKEREWVAGISNGGTTKYADSVKGRFTISADNAKNTVYLQMNSLKPEDTAVYYCAQGWKIVPTNWGQGTQVTVSS

SEQ ID NO: 1463 - protein, 112 aa, synthetic construct
EVQLVESGGGLVQAGGSLRLSCAASGRSFSNYVMGWFRQAPGKERERVATITSGGLTVYADSVKGRFTISADNAKNTVYLQMNSLKPEDTAVYYCALYRVNWGQGTQVTVSS

SEQ ID NO: 1464 - protein, 118 aa, synthetic construct
EVQLVESGGGLVQAGGSLRLSCAASGSIFSISDMGWFRQAPGKEREFVGAINWLSESTYYADSVKGRFTISADNAKNTVYLQMNSLKPEDTAVYYCAAQGGVLSGWDWGQGTQVTVSS

SEQ ID NO: 1465 - protein, 112 aa, synthetic construct
EVQLVESGGGLVQAGGSLRLSCAASGRTFSNYFMGWFRQAPGKERESVATVTWRDNITYYADSVKGRFTISADNAKNTVYLQMNSLKPEDTAVYYCASAGRWGQGTQVTVSS

SEQ ID NO: 1466 - protein, 112 aa, synthetic construct
EVQLVESGGGLVQAGGSLRLSCAASGLTFSNYVMGWFRQAPGKERESVAAINWDSARTYYADSVKGRFTISADNAKNTVYLQMNSLKPEDTAVYYCASAGRWGQGTQVTVSS

SEQ ID NO: 1467 - protein, 123 aa, synthetic construct
EVQLVESGGGLVQAGGSLRLSCAASGFTFRSFGMGWFRQAPGKEREFVASTIWSRGDTYYADSVKGRFTISADNAKNTVYLQMNSLKPEDTAVYYCASSPYGPLYRSTHYYDWGQGTQVTVSS

SEQ ID NO: 1468 - protein, 118 aa, synthetic construct
EVQLVESGGGLVQAGGSLRLSCAASGNTFSGGFMGWFRQAPGKEREWVASVLRGGYTWYADSVKGRFTISADNAKNTVYLQMNSLKPEDTAVYYCATGWQSTTKSQGWGQGTQVTVSS

SEQ ID NO: 1469 - protein, 114 aa, synthetic construct
EVQLVESGGGLVQAGGSLRLSCAASGLTISTYPMGWFRQAPGKEREFVAAVNWSGRRELYADSVKGRFTISADNAKNTVYLQMNSLKPEDTAVYYCAAFREYHWGQGTQVTVSS

SEQ ID NO: 1470 - protein, 121 aa, synthetic construct
EVQLVESGGGLVQAGGSLRLSCAASGPTFSIYDMGWFRQAPGKEREFVAAITWNSGRIGYADSVKGRFTISADNAKNTVYLQMNSLKPEDTAVYYCAAGVWSSLRHTAANWGQGTQVTVSS

SEQ ID NO: 1471 - protein, 119 aa, synthetic construct
EVQLVESGGGLVQAGGSLRLSCAASGFAFGDSWMGWFRQAPGKEREWVSGISSGGGRTYYADSVKGRFTISADNAKNTVYLQMNSLKPEDTAVYYCAADVWYGSTWRNWGQGTQVTVSS

SEQ ID NO: 1472 - protein, 118 aa, synthetic construct; identical to SEQ ID NO: 39

SEQ ID NO: 1473 - protein, 116 aa, synthetic construct
EVQLVESGGGLVQPGGSLRLSCAASGRTFGDYIMGWFRQAPGKERELVAEITRSGRTNYADSVKGRFTISADNSKNTAYLQMNSLKPEDTAVYYCAAVFSRGPLTWGQGTLVTVSS

SEQ ID NO: 1474 - protein, 119 aa, synthetic construct
EVQLVESGGGLVQPGGSLRLSCAASGFTFSGNWMGWFRQAPGKEREFVASISSSGISTYYADSVKGRFTISADNSKNTAYLQMNSLKPEDTAVYYCAADVWYGSTWRNWGQGTLVTVSS

SEQ ID NO: 1475 - protein, 118 aa, synthetic construct
EVQLVESGGGLVQPGGSLRLSCAASGFPVNRYWMGWFRQAPGKERELVATITSGGSTNYADSVKGRFTISADNSKNTAYLQMNSLKPEDTAVYYCAADVWYGSTWRNWGQGTLVTVSS

SEQ ID NO: 1476 - protein, 116 aa, synthetic construct
EVQLVESGGGLVQPGGSLRLSCAASGRTFGDYIMGWFRQAPGKEREFVATISRGGGSTYVDSVKGRFTISADNSKNTAYLQMNSLKPEDTAVYYCAAVFSRGPLTWGQGTLVTVSS

SEQ ID NO: 1477 - protein, 118 aa, synthetic construct; identical to SEQ ID NO: 40

SEQ ID NO: 1478 - protein, 129 aa, synthetic construct
EVQLVESGGGLVQPGGSLRLSCAASGSTFSINRMGWFRQAPGKEREWVATIVHSGGHSGGTSYYADSVKGRFTISADNSKNTAYLQMNSLKPEDTAVYYCAARPYTRPGSMWVSSLYDWGQGTLVTVSS

SEQ ID NO: 1479 - protein, 118 aa, synthetic construct; identical to SEQ ID NO: 41

SEQ ID NO: 1480 - protein, 116 aa, synthetic construct
EVQLVESGGGLVQPGGSLRLSCAASGGTLSGNAMGWFRQAPGKEREWVASIYWSSGNTYYADSVKGRFTISADNSKNTAYLQMNSLKPEDTAVYYCANSNKPKFDWGQGTLVTVSS

SEQ ID NO: 1481 - protein, 123 aa, synthetic construct
EVQLVESGGGLVQPGGSLRLSCAASGHTFSSYGMGWFRQAPGKERELVAAISWSGISTIYADSVKGRFTISADNSKNTAYLQMNSLKPEDTAVYYCASSPYGPLYRSTHYYDWGQGTLVTVSS

SEQ ID NO: 1482 - protein, 118 aa, synthetic construct
EVQLVESGGGLVQPGGSLRLSCAASGFTFSTSWMGWFRQAPGKEREFVASISTSGNTFYADSVKGRFTISADNSKNTAYLQMNSLKPEDTAVYYCAADVWYGSTWRNWGQGTLVTVSS

SEQ ID NO: 1483 - protein, 118 aa, synthetic construct
EVQLVESGGGLVQPGGSLRLSCAASGFTFSRYWMGWFRQAPGKEREAVASITSGGSTYYADSVKGRFTISADNSKNTAYLQMNSLKPEDTAVYYCAADVWYGSTWRNWGQGTLVTVSS

SEQ ID NO: 1484 - protein, 118 aa, synthetic construct
EVQLVESGGGLVQPGGSLRLSCAASGFTFDRSWMGWFRQAPGKEREWVASITSGGTTNYADSVKGRFTISADNSKNTAYLQMNSLKPEDTAVYYCAADVWYGSTWRNWGQGTLVTVSS

SEQ ID NO: 1485 - protein, 122 aa, synthetic construct
EVQLVESGGGLVQPGGSLRLSCAASGYTFRAYVMGWFRQAPGKERELVAVINYRGSSLKYADSVKGRFTISADNSKNTAYLQMNSLKPEDTAVYYCAASEWGGSDYDHDYDWGQGTLVTVSS

SEQ ID NO: 1486 - protein, 123 aa, synthetic construct
EVQLVESGGGLVQPGGSLRLSCAASGFTFSTYGMGWFRQAPGKEREFVAAISWSGVSKHYADSVKGRFTISADNSKNTAYLQMNSLKPEDTAVYYCASSPYGPLYRSTHYYDWGQGTLVTVSS

SEQ ID NO: 1487 - protein, 118 aa, synthetic construct
EVQLVESGGGLVQPGGSLRLSCAASGFTFSTSWMGWFRQAPGKERELVVSVTSGGYTNYADSVKGRFTISADNSKNTAYLQMNSLKPEDTAVYYCAADVWYGSTWRNWGQGTLVTVSS

SEQ ID NO: 1488 - protein, 118 aa, synthetic construct
EVQLVESGGGLVQPGGSLRLSCAASGFTMSSSWMGWFRQAPGKEREWVASINSGGTRNYADSVKGRFTISADNSKNTAYLQMNSLKPEDTAVYYCAADVWYGSTWRNWGQGTLVTVSS

SEQ ID NO: 1489 - protein, 118 aa, synthetic construct
EVQLVESGGGLVQPGGSLRLSCAASGFTFSGNWMGWFRQAPGKEREFVASISSGSAINYADSVKGRFTISADNSKNTAYLQMNSLKPEDTAVYYCAADVWYGSTWRNWGQGTLVTVSS

SEQ ID NO: 1490 - protein, 122 aa, synthetic construct
EVQLVESGGGLVQPGGSLRLSCAASGRTFGNYAMGWFRQAPGKEREFVADIRSSAGRTYYADSVKGRFTISADNSKNTAYLQMNSLKPEDTAVYYCAASEWGGSDYDHDYDWGQGTLVTVSS

SEQ ID NO: 1491 - protein, 118 aa, synthetic construct
EVQLVESGGGLVQPGGSLRLSCAASGFTFSGNWMGWFRQAPGKEREFVAGILSDGRELYADSVKGRFTISADNSKNTAYLQMNSLKPEDTAVYYCAADVWYGSTWRNWGQGTLVTVSS

SEQ ID NO: 1492 - protein, 119 aa, synthetic construct
EVQLVESGGGLVQPGGSLRLSCAASGFTLSGNWMGWFRQAPGKEREFVASISSSGISTYYADSVKGRFIISADNSKNTAYLQMNSLKPEDTAVYYCAADVWYGSTWRNWGQGTLVTVSS

SEQ ID NO: 1493 - protein, 121 aa, synthetic construct
EVQLVESGGGLVQPGGSLRLSCAASGRTFSTHAMGWFRQAPGKEREFVAAITPINWGGRGTHYADSVKGRFTISADNSKNTAYLQMNSLKPEDNAVYYCAAKRLRSGRWTWGQGTLVTVSS

SEQ ID NO: 1494 - protein, 116 aa, synthetic construct
EVQLVESGGGLVQPGGSLRLSCAASGFTFSNSGMGWFRQAPGKEREWVASIYWSSGNTYYADSVKGRFTISADNSKNTAYLQMNSLKPEDTAVYYCANSNKPKFDWGQGTLVTVSS

SEQ ID NO: 1495 - protein, 120 aa, synthetic construct
EVQLVESGGGLVQPGGSLRLSCAASGRTFSMGWFRQAPGKEREFVATVRWGTSSTYYADSVKGRFTISADNSKNTAYLQMNSLKPEDTAVYYCAAETFGSGSSLMSEYDWGQGTLVTVSS

SEQ ID NO: 1496 - protein, 116 aa, synthetic construct
EVQLVESGGGLVQPGGSLRLSCAASGNIFSRYIMGWFRQAPGKEREWVAGISNGGTTKYADSVKGRFTISADNSKNTAYLQMNSLKPEDTAVYYCAQGWKIVPTNWGQGTLVTVSS

SEQ ID NO: 1497 - protein, 118 aa, synthetic construct; identical to SEQ ID NO: 42

SEQ ID NO: 1498 - protein, 123 aa, synthetic construct
EVQLVESGGGLVQPGGSLRLSCAASGFTFGHYAMGWFRQAPGKEREFVAAISWSGVSTYYADSVKGRFTISADNSKNTAYLQMNSLKPEDTAVYYCASSPYGPLYRSTHYYDWGQGTLVTVSS

SEQ ID NO: 1499 - protein, 118 aa, synthetic construct
EVQLVESGGGLVQPGGSLRLSCAASGRTFSSYHMGWFRQAPGKERELVALISRVGVTSYADSVKGRFTISADNSKNTAYLQMNSLKPEDTAVYYCAAVRTYGSATYDWGQGTLVTVSS

SEQ ID NO: 1500 - protein, 112 aa, synthetic construct
EVQLVESGGGLVQPGGSLRLSCAASGRSRMGWFRQAPGKEREFVATISWSGSAVYADSVKGRFTISADNSKNTAYLQMNSLKPEDTAVYYCAAGGRYSARVWGQGTLVTVSS

SEQ ID NO: 1501 - protein, 118 aa, synthetic construct
EVQLVESGGGLVQPGGSLRLSCAASGRTYNMGWFRQAPGKEREWVATIYSRSGGSTTYYADSVKGRFTISADNSKNTAYLQMNSLKPEDTAVYYCATYGYDSGRYYSWGQGTLVTVSS

SEQ ID NO: 1502 - protein, 118 aa, synthetic construct
EVQLVESGGGLVQPGGSLRLSCAASGFTLSGNWMGWFRQAPGKEREFVASISSGGGTNYADSVKGRFTISADNSKNTAYLQMNSLKPEDTAVYYCAADVWYGSTWRNWGQGTLVTVSS

SEQ ID NO: 1503 - protein, 118 aa, synthetic construct; identical to SEQ ID NO: 43

SEQ ID NO: 1504 - protein, 118 aa, synthetic construct
EVQLVESGGGLVQPGGSLRLSCAASGFTFSTSWMGWFRQAPGKERELVASITSGGSTNYADSVKGRFTISADNSKNTAYLQMNSLKPEDTAVYYCAADVWYGSTWRNWGQGTLVTVSS

SEQ ID NO: 1505 - protein, 122 aa, synthetic construct
EVQLVESGGGLVQPGGSLRLSCAASGRSRYGMGWFRQAPGKEREFVSAISWSGISTYYADSVKGRFTISADNSKNTAYLQMNSLKPEDTAVYYCAATQWGSSGWKQARWYDWGQGTLVTVSS

SEQ ID NO: 1506 - protein, 118 aa, synthetic construct
EVQLVESGGGLVQPGGSLRLSCAASGFTFSTSWMGWFRQAPGKERELVASITSGGTTNYADSVKGRFTISADNSKNTAYLQMNSLKPEDTAVYYCAADVWYGSTWRNWGQGTLVTVSS

SEQ ID NO: 1507 - protein, 118 aa, synthetic construct
EVQLVESGGGLVQPGGSLRLSCAASGFTFDRSWMGWFRQAPGKERELVASVTSGGTTNYADSVKGRFTISADNSKNTAYLQMNSLKPEDTAVYYCAADVWYGSTWRNWGQGTLVTVSS

SEQ ID NO: 1508 - protein, 121 aa, synthetic construct
EVQLVESGGGLVQPGGSLRLSCAASGSIFSINSMGWFRQAPGKEREFVAALSWIIGSTYYADSVKGRFTISADNSKNTAYLQMNSLKPEDTAVYYCAVNGRWRSWSSQRDWGQGTLVTVSS

SEQ ID NO: 1509 - protein, 118 aa, synthetic construct
EVQLVESGGGLVQPGGSLRLSCAASGFTFDRSWMGWFRQAPGKERELVASITSGGSTSYADSVKGRFTISADNSKNTAYLQMNSLKPEDTAVYYCAADVWYGSTWRNWGQGTLVTVSS

SEQ ID NO: 1510 - protein, 118 aa, synthetic construct
EVQLVESGGGLVQPGGSLRLSCAASGFTFSTSWMGWFRQAPGKERELVAGVNSNGYINYADSVKGRFTISADNSKNTAYLQMNSLKPEDTAVYYCAADVWYGSTWRNWGQGTLVTVSS

SEQ ID NO: 1511 - protein, 116 aa, synthetic construct
EVQLVESGGGLVQPGGSLRLSCAASGSTLRDYVMGWFRQAPGKERELVSSISRSGTTMFADSVKGRFTIIADNSKNTAYLLMNSLKPQDTAVYYCAAVFSRGLLTCGQGTLVTVSS

SEQ ID NO: 1512 - protein, 121 aa, synthetic construct
EVQLVESGGGLVQPGGSLRLSCAASGGTLSSYIMGWFRQAPGKEREFVAAISGWSGGTTNYADSVKGRFTISADNSKNTAYLQMNSLKPEDTAVYYCAAARFAPGSRGYDWGQGTLVTVSS

SEQ ID NO: 1513 - protein, 118 aa, synthetic construct
EVQLVESGGGLVQPGGSLRLSCAASGFTFSTHWMGWFRQAPGKEREFVASIGSSGTTRYADSVKGRFTISADNSKNTAYLQMNSLKPEDTAVYYCAADVWYGSTWRNWGQGTLVTVSS

SEQ ID NO: 1514 - protein, 117 aa, synthetic construct
EVQLVESGGGLVQPGGSLRLSCAASGGTFSAFPMGWFRQAPGKERELVAAISSGGTTYYADSVKGRFTISADNSKNTAYLQMNSLKPEDTAVYYCAAQGGVLSAWDWGQGTLLTVSS

SEQ ID NO: 1515 - protein, 118 aa, synthetic construct
EVQLVESGGGLVQPGGSLRLSCAASGFTFSGNWMGWFRQAPGKEREWVASISSGGTTNYADSVKGRFTISADNSKNTAYLQMNSLKPEDTAVYYCAADVWYGSTWRNWGQGTLVTVSS

SEQ ID NO: 1516 - protein, 118 aa, synthetic construct
EVQLVESGGGLVQPGGSLRLSCAASGFTFSGNWMGWFRQAPGKEREFVAGVNSNGYINYADSVKGRFTISADNSKNTAYLQMNSLKPEDTAVYYCAADVWYGSTWRNWGQGTLVTVSS

SEQ ID NO: 1517 - protein, 118 aa, synthetic construct
EVQLVESGGGLVQPGGSLRLSCAASGFTFDRSWMGWFRQAPGKERELVASITSGGTTSYADSVKGRFTISADNSKNTAYLQMNSLKPEDTAVYYCAADVWYGSTWRNWGQGTLVTVSS

SEQ ID NO: 1518 - protein, 118 aa, synthetic construct
EVQLVESGGGLVQPGGSLRLSCAASGFTFSGNWMGWFRQAPGKEREWVVGISSGGTPHYADSVKGRFTISADNSKNTAYLQMNSLKPEDTAVYYCAADVWYGSTWRNWGQGTLVTVSS

SEQ ID NO: 1519 - protein, 118 aa, synthetic construct
EVQLVESGGGLVQPGGSLRLSCAASGFTLSSNWMGWFRQAPGKERELVAGVNSNGYINYADSVKGRFTISADNSKNTAYLQMNSLKPEDTAVYYCAADVWYGSTWRNWGQGTLVTVSS

SEQ ID NO: 1520 - protein, 118 aa, synthetic construct
EVQLVESGGGLVQPGGSLRLSCAASGFDFSVSWMGWFRQAPGKERELVARISSGGELPYYADSVKGRFTISADNSKNTAYLQMNSLKPKHTAVYYCAARPNTRPGSMWGQGTLVTVSS

SEQ ID NO: 1521 - protein, 118 aa, synthetic construct
EVQLVESGGGLVQPGGSLRLSCAASGFTMSSSWMGWFRQAPGKEREFVGGISSGGSTYYADSVKGRFTISADNSKNTAYLQMNSLKPEDTAVYYCAADVWYGSTWRNWGQGTLVTVSS

SEQ ID NO: 1522 - protein, 120 aa, synthetic construct
EVQLVESGGGLVQPGGSLRLSCAASGRNFRRNSMGWFRQAPGKEREFVAVITRSGGGEVTTYADSVKGRFTISADNSKNTAYLQMNSLKPEDTAVYYCAMSSVTRGSSDWGQGTLVTVSS

SEQ ID NO: 1523 - protein, 118 aa, synthetic construct
EVQLVESGGGLVQPGGSLRLSCAASGFTFDRSWMGWFRQAPGKEREFVAGITSSGIPNYADSVKGRFTISADNSKNTAYLQMNSLKPEDTAVYYCAADVWYGSTWRNWGQGTLVTVSS

SEQ ID NO: 1524 - protein, 116 aa, synthetic construct
EVQLVESGGGLVQPGGSLRLSCAASGLTISTYNMGWFRQAPGKERELVSAIGWSGASTYYADSVKGRFTISADNSKNTAYLQMNSLKPEDTAVYYCAAFRGRMYDWGQGTLVTVSS

SEQ ID NO: 1525 - protein, 118 aa, synthetic construct
EVQLVESGGGLVQPGGSLRLSCAASGFTFSTSWMGWFRQAPGKERELVAAVTSGGNTNYADSVKGRFTISADNSKNTAYLQMNSLKPEDTAVYYCAADVWYGSTWRNWGQGTLVTVSS

SEQ ID NO: 1526 - protein, 116 aa, synthetic construct
EVQLVESGGGLVQPGGSLRLSCAASGRTFGDYIMGWFRQAPGKERELVAEITRVGNTNYADSVKGRFTISADNSKNTAYLQMNSLKPEDTAVYYCAAVFSRGPLTWGQGTLVTVSS

SEQ ID NO: 1527 - protein, 120 aa, synthetic construct; identical to SEQ ID NO: 44

SEQ ID NO: 1528 - protein, 115 aa, synthetic construct
QVQLVQSGAEVKKPGSSVKVSCKASGGIFSSYAISWVRQAPGQGLEWMGGIIPTNYAQKFQGRVTITADESTSTAYMELSSLRSEDTAVYYCARWRGGLSAFDVWGQGTLVTVSS

SEQ ID NO: 1529 - protein, 120 aa, synthetic construct
QVQLVQSGAEVKKPGSSVKVSCKASGGTYTTHGISWVRQAPGQGLEWMGGIIPINYAQKFQGRVTITADESTSTAYMELSSLRSEDTAVYYCARAFGLASGKGPGVFDYWGQGTLVTVSS

SEQ ID NO: 1530 - protein, 116 aa, synthetic construct
EVQLLESGGGLVQPGGSLRLSCAASGFSFGSYAMSWVRQAPGKGLEWVSAITGSYYADSVKGRFTISRDNSKNTLYLQMNSLRAEDTAVYYCARVLGNSGRGLDYWGQGTLVTVSS

SEQ ID NO: 1531 - protein, 116 aa, synthetic construct
QVQLVQSGAEVKKPGSSVKVSCKASGGPFNKYAISWVRQAPGQGLEWMGGIIPMNYAQKFQGRVTITADESTSTAYMELSSLRSEDTAVYYCARGSHQLYYAFEYWGQGTLVTVSS

SEQ ID NO: 1532 - protein, 117 aa, synthetic construct
EVQLLESGGGLVQPGGSLRLSCAASGFTFSTYLMIWVRQAPGKGLEWVSAISGSYYADSVKGRFTISRDNSKNTLYLQMNSLRAEDTAVYYCARDVEGQVGHFFDPWGQGTLVTVSS

SEQ ID NO: 1533 - protein, 121 aa, synthetic construct
EVQLLESGGGLVQPGGSLRLSCAASGFTLSSYSMSWVRQAPGKGLEWVSAINPSYYADSVKGRFTISRDNSKNTLYLQMNSLRAEDTAVYYCAKGIKAFGGTRLPLYFDSWGQGTLVTVSS

SEQ ID NO: 1534 - protein, 116 aa, synthetic construct
EVQLLESGGGLVQPGGSLRLSCAASGFTFGNYAMSWVRQAPGKGLEWVSAITGSYYADSVKGRFTISRDNSKNTLYLQMNSLRAEDTAVYYCAKHLLSRSRGLDVWGQGTLVTVSS

SEQ ID NO: 1535 - protein, 116 aa, synthetic construct
EVQLLESGGGLVQPGGSLRLSCAASGFTFGTYSMSWVRQAPGKGLEWVSAITGSYYADSVKGRFTISRDNSKNTLYLQMNSLRAEDTAVYYCAKHLLARSGGMHLWGQGTLVTVSS

SEQ ID NO: 1536 - protein, 114 aa, synthetic construct
EVQLLESGGGLVQPGGSLRLSCAASGFSFSNHAMSWVRQAPGKGLEWVSAISGSYYADSVKGRFTISRDNSKNTLYLQMNSLRAEDTAVYYCARSTRDRAFDYWGQGTLVTVSS

SEQ ID NO: 1537 - protein, 114 aa, synthetic construct
EVQLLESGGGLVQPGGSLRLSCAASGFSFSSSGMSWVRQAPGKGLEWVSAISGSYYADSVKGRFTISRDNSKNTLYLQMNSLRAEDTAVYYCVKVGDYFAFDHWGQGTLVTVSS

SEQ ID NO: 1538 - protein, 116 aa, synthetic construct
QVQLVQSGAEVKKPGSSVKVSCKASGGTFRRHAISWVRQAPGQGLEWMGGIIPMNYAQKFQGRVTITADESTSTAYMELSSLRSEDTAVYYCARGTALVRRAFDIWGQGTLVTVSS

SEQ ID NO: 1539 - protein, 120 aa, synthetic construct; identical to SEQ ID NO: 1529

SEQ ID NO: 1540 - protein, 115 aa, synthetic construct
EVQLLESGGGLVQPGGSLRLSCAASGFTFSNYAMSWVRQAPGKGLEWVSAISGGYYADSVKGRFTISRDNSKNTLYLQMNSLRAEDTAVYYCAKHRVGARAFDVWGQGTLVTVSS

SEQ ID NO: 1541 - protein, 115 aa, synthetic construct
EVQLLESGGGLVQPGGSLRLSCAASGFTFSNYAMSWVRQAPGKGLEWVSAISGNYYADSVKGRFTISRDNSKNTLYLQMNSLRAEDTAVYYCAKHRVGARAFDVWGQGTLVTVSS

SEQ ID NO: 1542 - protein, 117 aa, synthetic construct
QVQLVQSGAEVKKPGSSVKVSCKASGGTFNIYAISWVRQAPGQGLEWMGGIIPINYAQKFQGRVTITADESTSTAYMELSSLRSEDTAVYYCARHPRDFGIHGLDVWGQGTLVTVSS

SEQ ID NO: 1543 - protein, 114 aa, synthetic construct
QVQLVQSGAEVKKPGSSVKVSCKASGGTFSRYGISWVRQAPGQGLEWMGGIIPINYAQKFQGRVTITADESTSTAYMELSSLRSEDTAVYYCARVRGGYYYDTWGQGTLVTVSS

SEQ ID NO: 1544 - protein, 116 aa, synthetic construct
QVQLVQSGAEVKKPGSSVKVSCKASGGTFTNHAISWVRQAPGQGLEWMGGINPLNYAQKFQGRVTITADESTSTAYMELSSLRSEDTAVYYCATGGGHFRSGRDVWGQGTLVTVSS

SEQ ID NO: 1545 - protein, 115 aa, synthetic construct
EVQLLESGGGLVQPGGSLRLSCAASGFTFASYAMSWVRQAPGKGLEWVSAITNSYYADSVKGRFTISRDNSKNTLYLQMNSLRAEDTAVYYCARHLRLGRGFDSWGQGTLVTVSS

SEQ ID NO: 1546 - protein, 116 aa, synthetic construct
QVQLVQSGAEVKKPGSSVKVSCKASGGTFTYYPISWVRQAPGQGLEWMGGIIPFNYAQKFQGRVTITADESTSTAYMELSSLRSEDTAVYYCATPSGGIGRRLDVWGQGTLVTVSS

SEQ ID NO: 1547 - protein, 120 aa, synthetic construct
QVQLVQSGAEVKKPGSSVKVSCKASGGTYTTHGISWVRQAPGQGLEWMGGIIPINYAQKFQGRVTITADESTSTAYMELSSLRSEDTAVYYCAKAFGLASGKGPGVFDYWGQGTLVTVSS

SEQ ID NO: 1548 - protein, 119 aa, synthetic construct
QVQLVQSGAEVKKPGSSVKVSCKASGGTFSQYAISWVRQAPGQGLEWMGGIIPMNYAQKFQGRVTITADESTSTAYMELSSLRSEDTAVYYCARESRTLFGVPNAFDIWGQGTLVTVSS

SEQ ID NO: 1549 - protein, 112 aa, synthetic construct
DIQMTQSPSSLSASVGDRVTITCRSSQSLVHSTGNTYLHWYQQKPGKAPKLLIYAASDLESGVPSRFSGSGSGTDFTLTISSLQPEDFATYYCQQGHTLPWTFGQGTKVEIK

SEQ ID NO: 1550 - protein, 107 aa, synthetic construct
DIQMTQSPSSLSASVGDRVTITCRTSQDIGNYLNWYQQKPGKAPKLLIYPKHNRPPGVPSRFSGSGSGTDFTLTISSLQPEDFATYYCQQSYNSPWTFGQGTKVEIK

SEQ ID NO: 1551 - protein, 112 aa, synthetic construct; identical to SEQ ID NO: 1549

SEQ ID NO: 1552 - protein, 112 aa, synthetic construct; identical to SEQ ID NO: 1549

SEQ ID NO: 1553 - protein, 112 aa, synthetic construct; identical to SEQ ID NO: 1549

SEQ ID NO: 1554 - protein, 112 aa, synthetic construct; identical to SEQ ID NO: 1549

SEQ ID NO: 1555 - protein, 111 aa, synthetic construct
DIQMTQSPSSLSASVGDRVTITCSGDKLRNKYASWYQQKPGKAPKLLIYGQHNRPSGVPSRFSGSGSGTDFTLTISSLQPEDFATYYCQGSYYSGSGWYYAFGQGTKVEIK

SEQ ID NO: 1556 - protein, 112 aa, synthetic construct; identical to SEQ ID NO: 1549

SEQ ID NO: 1557 - protein, 112 aa, synthetic construct; identical to SEQ ID NO: 1549

SEQ ID NO: 1558 - protein, 112 aa, synthetic construct; identical to SEQ ID NO: 1549

SEQ ID NO: 1559 - protein, 112 aa, synthetic construct; identical to SEQ ID NO: 1549

SEQ ID NO: 1560 - protein, 110 aa, synthetic construct
DIQMTQSPSSLSASVGDRVTITCSGDKLGHTYTSWYQQKPGKAPKLLIYYTSSLHSGVPSRFSGSGSGTDFTLTISSLQPEDFATYYCATRAVRGNPHVLFGQGTKVEIK

SEQ ID NO: 1561 - protein, 107 aa, synthetic construct
DIQMTQSPSSLSASVGDRVTITCRASQSIREYLHWYQQKPGKAPKLLIYFGSELRKGVPSRFSGSGSGTDFTLTISSLQPEDFATYYCGQGVLWPATFGQGTKVEIK

SEQ ID NO: 1562 - protein, 106 aa, synthetic construct
DIQMTQSPSSLSASVGDRVTITCSGDTLGGKYAWWYQQKPGKAPKLLIYQNDKRPSGVPSRFSGSGSGTDFTLTISSLQPEDFATYYCHQWSSYPTFGQGTKVEIK

SEQ ID NO: 1563 - protein, 111 aa, synthetic construct
DIQMTQSPSSLSASVGDRVTITCQSSQSVYSNNELSWYQQKPGKAPKLLIYGTSYRYSGVPSRFSGSGSGTDFTLTISSLQPEDFATYYCSSWAGSRSGTVFGQGTKVEIK

SEQ ID NO: 1564 - protein, 107 aa, synthetic construct
DIQMTQSPSSLSASVGDRVTITCSGDKLGHTYTSWYQQKPGKAPKLLIYRTSWLQSGVPSRFSGSGSGTDFTLTISSLQPEDFATYYCQQYHSYPPTFGQGTKVEIK

SEQ ID NO: 1565 - protein, 107 aa, synthetic construct
DIQMTQSPSSLSASVGDRVTITCRASQTIERRLNWYQQKPGKAPKLLIYQNDKRPSGVPSRFSGSGSGTDFTLTISSLQPEDFATYYCQQSYSIPPTFGQGTKVEIK

SEQ ID NO: 1566 - protein, 107 aa, synthetic construct
DIQMTQSPSSLSASVGDRVTITCSGDKLGDKYTSWYQQKPGKAPKLLIYHTSRLQDGVPSRFSGSGSGTDFTLTISSLQPEDFATYYCQQSYNLPLTFGQGTKVEIK

SEQ ID NO: 1567 - protein, 112 aa, synthetic construct; identical to SEQ ID NO: 1549

SEQ ID NO: 1568 - protein, 112 aa, synthetic construct; identical to SEQ ID NO: 1549

SEQ ID NO: 1569 - protein, 112 aa, synthetic construct; identical to SEQ ID NO: 1549

SEQ ID NO: 1570 - protein, 107 aa, synthetic construct
DIQMTQSPSSLSASVGDRVTITCRASQGVRTSLAWYQQKPGKAPKLLIYAKNNRPSGVPSRFSGSGSGTDFTLTISSLQPEDFATYYCQQSYHTPQTFGQGTKVEIK

SEQ ID NO: 1571 - protein, 112 aa, synthetic construct; identical to SEQ ID NO: 1549

SEQ ID NO: 1572 - protein, 112 aa, synthetic construct; identical to SEQ ID NO: 1549

SEQ ID NO: 1573 - protein, 107 aa, synthetic construct
DIQMTQSPSSLSASVGDRVTITCRASQTIERRLNWYQQKPGKAPKLLIYAKNNRPSGVPSRFSGSGSGTDFTLTISSLQPEDFATYYCQQTALVPYTFGQGTKVEIK

SEQ ID NO: 1574 - protein, 107 aa, synthetic construct
DIQMTQSPSSLSASVGDRVTITCRASQTIGDYLNWYQQKPGKAPKLLIYGASSRATGVPSRFSGSGSGTDFTLTISSLQPEDFATYYCAQGAALPRTFGQGTKVEIK

SEQ ID NO: 1575 - protein, 112 aa, synthetic construct; identical to SEQ ID NO: 1549

SEQ ID NO: 1576 - protein, 107 aa, synthetic construct
DIQMTQSPSSLSASVGDRVTITCQGASLRNYYASWYQQKPGKAPKLLIYDTSKVASGVPSRFSGSGSGTDFTLTISSLQPEDFATYYCFQGSHIPYTFGQGTKVEIK

SEQ ID NO: 1577 - protein, 107 aa, synthetic construct
DIQMTQSPSSLSASVGDRVTITCRASQSISNNLNWYQQKPGKAPKLLIYAKNNRPSGVPSRFSGSGSGTDFTLTISSLQPEDFATYYCQQSYTTPPTFGQGTKVEIK

SEQ ID NO: 1578 - protein, 107 aa, synthetic construct
DIQMTQSPSSLSASVGDRVTITCRASQPIGPDLLWYQQKPGKAPKLLIYRKSNRPSGVPSRFSGSGSGTDFTLTISSLQPEDFATYYCQQSYSTPYTFGQGTKVEIK

SEQ ID NO: 1579 - protein, 107 aa, synthetic construct
DIQMTQSPSSLSASVGDRVTITCRASQSIRRFLNWYQQKPGKAPKLLIYWASDRESGVPSRFSGSGSGTDFTLTISSLQPEDFATYYCQQTATWPFTFGQGTKVEIK

SEQ ID NO: 1580 - protein, 112 aa, synthetic construct; identical to SEQ ID NO: 1549

SEQ ID NO: 1581 - protein, 112 aa, synthetic construct; identical to SEQ ID NO: 1549

SEQ ID NO: 1582 - protein, 107 aa, synthetic construct
DIQMTQSPSSLSASVGDRVTITCRANQNIGNFLNWYQQKPGKAPKLLIYQDFKRPSGVPSRFSGSGSGTDFTLTISSLQPEDFATYYCHQRSSYPWTFGQGTKVEIK

SEQ ID NO: 1583 - protein, 110 aa, synthetic construct
DIQMTQSPSSLSASVGDRVTITCSGNKLGDKYASWYQQKPGKAPKLLIYRTSWLQSGVPSRFSGSGSGTDFTLTISSLQPEDFATYYCVARAVRGNPHVLFGQGTKVEIK

SEQ ID NO: 1584 - protein, 112 aa, synthetic construct; identical to SEQ ID NO: 1549

SEQ ID NO: 1585 - protein, 112 aa, synthetic construct; identical to SEQ ID NO: 1549

SEQ ID NO: 1586 - protein, 112 aa, synthetic construct; identical to SEQ ID NO: 1549

SEQ ID NO: 1587 - protein, 112 aa, synthetic construct; identical to SEQ ID NO: 1549

SEQ ID NO: 1588 - protein, 107 aa, synthetic construct
DIQMTQSPSSLSASVGDRVTITCRASQDIGNFLNWYQQKPGKAPKLLIYRTSWLQSGVPSRFSGSGSGTDFTLTISSLQPEDFATYYCQQRSSYPPTFGQGTKVEIK

SEQ ID NO: 1589 - protein, 112 aa, synthetic construct; identical to SEQ ID NO: 1549

SEQ ID NO: 1590 - protein, 107 aa, synthetic construct
DIQMTQSPSSLSASVGDRVTITCRASQGVRTSLAWYQQKPGKAPKLLIYGKNIRPSGVPSRFSGSGSGTDFTLTISSLQPEDFATYYCQQSYSFPLTFGQGTKVEIK

SEQ ID NO: 1591 - protein, 107 aa, synthetic construct
DIQMTQSPSSLSASVGDRVTITCRASQSIRRYLNWYQQKPGKAPKLLIYWASDRESGVPSRFSGSGSGTDFTLTISSLQPEDFATYYCQQSFSTPLTFGQGTKVEIK

SEQ ID NO: 1592 - protein, 112 aa, synthetic construct; identical to SEQ ID NO: 1549

SEQ ID NO: 1593 - protein, 107 aa, synthetic construct
DIQMTQSPSSLSASVGDRVTITCRASQSIRRYLNWYQQKPGKAPKLLIYDASNLQSGVPSRFSGSGSGTDFTLTISSLQPEDFATYYCQQSYDFPRTFGQGTKVEIK

SEQ ID NO: 1594 - protein, 112 aa, synthetic construct; identical to SEQ ID NO: 1549

SEQ ID NO: 1595 - protein, 112 aa, synthetic construct; identical to SEQ ID NO: 1549

SEQ ID NO: 1596 - protein, 112 aa, synthetic construct; identical to SEQ ID NO: 1549

SEQ ID NO: 1597 - protein, 112 aa, synthetic construct; identical to SEQ ID NO: 1549

SEQ ID NO: 1598 - protein, 112 aa, synthetic construct; identical to SEQ ID NO: 1549

SEQ ID NO: 1599 - protein, 107 aa, synthetic construct
DIQMTQSPSSLSASVGDRVTITCRASQGVRTSLAWYQQKPGKAPKLLIYAKNNRPSGVPSRFSGSGSGTDFTLTISSLQPEDFATYYCQQSYSAPYTFGQGTKVEIK

SEQ ID NO: 1600 - protein, 112 aa, synthetic construct; identical to SEQ ID NO: 1549

SEQ ID NO: 1601 - protein, 107 aa, synthetic construct
DIQMTQSPSSLSASVGDRVTITCRASQTIGDYLNWYQQKPGKAPKLLIYGQHNRPSGVPSRFSGSGSGTDFTLTISSLQPEDFATYYCQQSFSIPWTFGQGTKVEIK

SEQ ID NO: 1602 - protein, 107 aa, synthetic construct
DIQMTQSPSSLSASVGDRVTITCKASDHIGKFLTWYQQKPGKAPKLLIYAASKLASGVPSRFSGSGSGTDFTLTISSLQPEDFATYYCQQVVWRPFTFGQGTKVEIK

SEQ ID NO: 1603 - protein, 107 aa, synthetic construct
DIQMTQSPSSLSASVGDRVTITCRASQTIGDYLNWYQQKPGKAPKLLIYHDNKRPSGVPSRFSGSGSGTDFTLTISSLQPEDFATYYCQQDAFHPPTFGQGTKVEIK

SEQ ID NO: 1604 - protein, 112 aa, synthetic construct; identical to SEQ ID NO: 1549

SEQ ID NO: 1605 - protein, 112 aa, synthetic construct
DIQMTQSPSSLSASVGDRVTITCRSSQSLVHSTGNTYLHWYQQKPGKAPKLLIYGKNIRPSGVPSRFSGSGSGTDFTLTISSLQPEDFATYYCQQSYTTPWTFGQGTKVEIK

SEQ ID NO: 1606 - protein, 112 aa, synthetic construct; identical to SEQ ID NO: 1549

SEQ ID NO: 1607 - protein, 112 aa, synthetic construct; identical to SEQ ID NO: 1549

SEQ ID NO: 1608 - protein, 112 aa, synthetic construct; identical to SEQ ID NO: 1549

SEQ ID NO: 1609 - protein, 112 aa, synthetic construct; identical to SEQ ID NO: 1549

SEQ ID NO: 1610 - protein, 112 aa, synthetic construct; identical to SEQ ID NO: 1549

SEQ ID NO: 1611 - protein, 112 aa, synthetic construct; identical to SEQ ID NO: 1549

SEQ ID NO: 1612 - protein, 112 aa, synthetic construct; identical to SEQ ID NO: 1549

SEQ ID NO: 1613 - protein, 112 aa, synthetic construct; identical to SEQ ID NO: 1549

SEQ ID NO: 1614 - protein, 112 aa, synthetic construct; identical to SEQ ID NO: 1549

SEQ ID NO: 1615 - protein, 112 aa, synthetic construct; identical to SEQ ID NO: 1549

SEQ ID NO: 1616 - protein, 112 aa, synthetic construct; identical to SEQ ID NO: 1549

SEQ ID NO: 1617 - protein, 107 aa, synthetic construct
DIQMTQSPSSLSASVGDRVTITCRASQNIRSYLNWYQQKPGKAPKLLIYGASTLQSGVPSRFSGSGSGTDFTLTISSLQPEDFATYYCQQSYENPLTFGQGTKVEIK

SEQ ID NO: 1618 - protein, 112 aa, synthetic construct; identical to SEQ ID NO: 1549

SEQ ID NO: 1619 - protein, 112 aa, synthetic construct; identical to SEQ ID NO: 1549

SEQ ID NO: 1620 - protein, 107 aa, synthetic construct
DIQMTQSPSSLSASVGDRVTITCRASHNINSYLNWYQQKPGKAPKLLIYGKNIRPSGVPSRFSGSGSGTDFTLTISSLQPEDFATYYCQQSYIIPPTFGQGTKVEIK

SEQ ID NO: 1621 - protein, 112 aa, synthetic construct; identical to SEQ ID NO: 1549

SEQ ID NO: 1622 - protein, 112 aa, synthetic construct; identical to SEQ ID NO: 1549

SEQ ID NO: 1623 - protein, 112 aa, synthetic construct; identical to SEQ ID NO: 1549

SEQ ID NO: 1624 - protein, 112 aa, synthetic construct; identical to SEQ ID NO: 1549

SEQ ID NO: 1625 - protein, 107 aa, synthetic construct
DIQMTQSPSSLSASVGDRVTITCRASQSVRSYLNWYQQKPGKAPKLLIYAASSLYSGVPSRFSGSGSGTDFTLTISSLQPEDFATYYCQQYASVPVTFGQGTKVEIK

SEQ ID NO: 1626 - protein, 112 aa, synthetic construct; identical to SEQ ID NO: 1549

SEQ ID NO: 1627 - protein, 107 aa, synthetic construct
DIQMTQSPSSLSASVGDRVTITCRASQSVRSYLNWYQQKPGKAPKLLIYAATTLQSGVPSRFSGSGSGTDFTLTISSLQPEDFATYYCQQSYIIPPTFGQGTKVEIK

SEQ ID NO: 1628 - protein, 107 aa, synthetic construct
DIQMTQSPSSLSASVGDRVTITCRASQGVRTSLAWYQQKPGKAPKLLIYGKNIRPSGVPSRFSGSGSGTDFTLTISSLQPEDFATYYCQQGYRWPVTFGQGTKVEIK

SEQ ID NO: 1629 - protein, 112 aa, synthetic construct; identical to SEQ ID NO: 1549

SEQ ID NO: 1630 - protein, 112 aa, synthetic construct; identical to SEQ ID NO: 1549

SEQ ID NO: 1631 - protein, 110 aa, synthetic construct
DIQMTQSPSSLSASVGDRVTITCSGDKLGDKYTSWYQQKPGKAPKLLIYGASSRATGVPSRFSGSGSGTDFTLTISSLQPEDFATYYCMSRSIWGNPHVLFGQGTKVEIK

SEQ ID NO: 1632 - protein, 110 aa, synthetic construct; identical to SEQ ID NO: 1560

SEQ ID NO: 1633 - protein, 112 aa, synthetic construct; identical to SEQ ID NO: 1549

SEQ ID NO: 1634 - protein, 112 aa, synthetic construct; identical to SEQ ID NO: 1549

SEQ ID NO: 1635 - protein, 107 aa, synthetic construct
DIQMTQSPSSLSASVGDRVTITCRASQTIGDYLNWYQQKPGKAPKLLIYQDFKRPSGVPSRFSGSGSGTDFTLTISSLQPEDFATYYCQQYHDFPLTFGQGTKVEIK

SEQ ID NO: 1636 - protein, 112 aa, synthetic construct; identical to SEQ ID NO: 1549

SEQ ID NO: 1637 - protein, 112 aa, synthetic construct; identical to SEQ ID NO: 1549

SEQ ID NO: 1638 - protein, 107 aa, synthetic construct
DIQMTQSPSSLSASVGDRVTITCSGDRLGEKYVSWYQQKPGKAPKLLIYGTTSLESGVPSRFSGSGSGTDFTLTISSLQPEDFATYYCQQGYTLPWTFGQGTKVEIK

SEQ ID NO: 1639 - protein, 107 aa, synthetic construct
DIQMTQSPSSLSASVGDRVTITCRASQSIREYLHWYQQKPGKAPKLLIYFGSELRKGVPSRFSGSGSGTDFTLTISSLQPEDFATYYCQNGHSFPLTFGQGTKVEIK

SEQ ID NO: 1640 - protein, 112 aa, synthetic construct; identical to SEQ ID NO: 1549

SEQ ID NO: 1641 - protein, 107 aa, synthetic construct
DIQMTQSPSSLSASVGDRVTITCSASQDINKYLNWYQQKPGKAPKLLIYHTSRLQSGVPSRFSGSGSGTDFTLTISSLQPEDFATYYCQQFAYFPATFGQGTKVEIK

SEQ ID NO: 1642 - protein, 112 aa, synthetic construct; identical to SEQ ID NO: 1549

SEQ ID NO: 1643 - protein, 107 aa, synthetic construct; identical to SEQ ID NO: 1599

SEQ ID NO: 1644 - protein, 112 aa, synthetic construct; identical to SEQ ID NO: 1549

SEQ ID NO: 1645 - protein, 112 aa, synthetic construct; identical to SEQ ID NO: 1549

SEQ ID NO: 1646 - protein, 107 aa, synthetic construct
DIQMTQSPSSLSASVGDRVTITCRASHFIGSLLSWYQQKPGKAPKLLIYETSKLASGVPSRFSGSGSGTDFTLTISSLQPEDFATYYCQQSYSYPRTFGQGTKVEIK

SEQ ID NO: 1647 - protein, 112 aa, synthetic construct; identical to SEQ ID NO: 1549

SEQ ID NO: 1648 - protein, 112 aa, synthetic construct; identical to SEQ ID NO: 1549

SEQ ID NO: 1649 - protein, 112 aa, synthetic construct; identical to SEQ ID NO: 1549

SEQ ID NO: 1650 - protein, 107 aa, synthetic construct; identical to SEQ ID NO: 1577

SEQ ID NO: 1651 - protein, 112 aa, synthetic construct; identical to SEQ ID NO: 1549

SEQ ID NO: 1652 - protein, 107 aa, synthetic construct
DIQMTQSPSSLSASVGDRVTITCRASQSISNNLNWYQQKPGKAPKLLIYDASSSQSGVPSRFSGSGSGTDFTLTISSLQPEDFATYYCQQSSSTPWTFGQGTKVEIK

SEQ ID NO: 1653 - protein, 112 aa, synthetic construct; identical to SEQ ID NO: 1549

SEQ ID NO: 1654 - protein, 112 aa, synthetic construct; identical to SEQ ID NO: 1549

SEQ ID NO: 1655 - protein, 112 aa, synthetic construct; identical to SEQ ID NO: 1549

SEQ ID NO: 1656 - protein, 112 aa, synthetic construct; identical to SEQ ID NO: 1549

SEQ ID NO: 1657 - protein, 112 aa, synthetic construct; identical to SEQ ID NO: 1549

SEQ ID NO: 1658 - protein, 107 aa, synthetic construct
DIQMTQSPSSLSASVGDRVTITCRASQTIERRLNWYQQKPGKAPKLLIYGTTSLESGVPSRFSGSGSGTDFTLTISSLQPEDFATYYCQQSYTTLWTFGQGTKVEIK

SEQ ID NO: 1659 - protein, 107 aa, synthetic construct
DIQMTQSPSSLSASVGDRVTITCSGDNLRGYYASWYQQKPGKAPKLLIYGTSYRYSGVPSRFSGSGSGTDFTLTISSLQPEDFATYYCQQNLAPPYTFGQGTKVEIK

SEQ ID NO: 1660 - protein, 112 aa, synthetic construct; identical to SEQ ID NO: 1549

SEQ ID NO: 1661 - protein, 107 aa, synthetic construct
DIQMTQSPSSLSASVGDRVTITCSGDKLGHTYTSWYQQKPGKAPKLLIYGKNIRPSGVPSRFSGSGSGTDFTLTISSLQPEDFATYYCQQNLAPPYTFGQGTKVEIK

SEQ ID NO: 1662 - protein, 107 aa, synthetic construct
DIQMTQSPSSLSASVGDRVTITCRASQSISNNLNWYQQKPGKAPKLLIYTASNLQNGVPSRFSGSGSGTDFTLTISSLQPEDFATYYCQQSNSWPYTFGQGTKVEIK

SEQ ID NO: 1663 - protein, 112 aa, synthetic construct; identical to SEQ ID NO: 1549

SEQ ID NO: 1664 - protein, 107 aa, synthetic construct
DIQMTQSPSSLSASVGDRVTITCRASQTIERRLNWYQQKPGKAPKLLIYHDNKRPSGVPSRFSGSGSGTDFTLTISSLQPEDFATYYCQQGYTLPWTFGQGTKVEIK

SEQ ID NO: 1665 - protein, 110 aa, synthetic construct
EIVLTQSPATLSLSPGERATLSCRASQSVSSGYLAWYQQKPGQAPRLLIYSTSSRATGIPDRFSGSGSGTDFTLTISRLEPEDFAVYYCQQSASAHPGWTFGQGTKVEIK

SEQ ID NO: 1666 - protein, 107 aa, synthetic construct
DIQMTQSPSSLSASVGDRVTITCRASQSINTFLNWYQQKPGKAPKLLIYGASSLQSGVPSRFSGSGSGTDFTLTISSLQPEDFATYYCQQGYRAPWTFGQGTKVEIK

SEQ ID NO: 1667 - protein, 107 aa, synthetic construct
DIQMTQSPSSLSASVGDRVTITCRASQSVSSYLNWYQQKPGKAPKLLIYAATSLQSGVPSRFSGSGSGTDFTLTISSLQPEDFATYYCQQGYSTPWTFGQGTKVEIK

SEQ ID NO: 1668 - protein, 107 aa, synthetic construct
DIQMTQSPSSLSASVGDRVTITCRASQSIRTYLNWYQQKPGKAPKLLIYGASSLQSGVPSRFSGSGSGTDFTLTISSLQPEDFATYYCQQSYRVPRSFGQGTKVEIK

SEQ ID NO: 1669 - protein, 109 aa, synthetic construct
EIVLTQSPATLSLSPGERATLSCRASQSVSSGYLAWYQQKPGQAPRLLIYDASSRATGIPDRFSGSGSGTDFTLTISRLEPEDFAVYYCQHFGGSPLLTFGQGTKVEIK

SEQ ID NO: 1670 - protein, 106 aa, synthetic construct
DIQMTQSPSSLSASVGDRVTITCRASQHIGKYLNWYQQKPGKAPKLLIYGASSLQSGVPSRFSGSGSGTDFTLTISSLQPEDFATYYCQQTYSPVTFGQGTKVEIK

SEQ ID NO: 1671 - protein, 107 aa, synthetic construct
DIQMTQSPSSLSASVGDRVTITCRASQSIGGYLNWYQQKPGKAPKLLIYAVSSLQSGVPSRFSGSGSGTDFTLTISSLQPEDFATYYCQQGFYTPWTFGQGTKVEIK

SEQ ID NO: 1672 - protein, 107 aa, synthetic construct; identical to SEQ ID NO: 1666

SEQ ID NO: 1673 - protein, 107 aa, synthetic construct
DIQMTQSPSSLSASVGDRVTITCRASQNIGKYLNWYQQKPGKAPKLLIYAASSLQSGVPSRFSGSGSGTDFTLTISSLQPEDFATYYCHQSYGIPWTFGQGTKVEIK

SEQ ID NO: 1674 - protein, 107 aa, synthetic construct
DIQMTQSPSSLSASVGDRVTITCRASQNIRNYLNWYQQKPGKAPKLLIYGASSLQSGVPSRFSGSGSGTDFTLTISSLQPEDFATYYCQQSYRSFFTFGQGTKVEIK

SEQ ID NO: 1675 - protein, 107 aa, synthetic construct
DIQMTQSPSSLSASVGDRVTITCRASQSIKNYLNWYQQKPGKAPKLLIYTASSLQSGVPSRFSGSGSGTDFTLTISSLQPEDFATYYCQQSYGNVWTFGQGTKVEIK

SEQ ID NO: 1676 - protein, 107 aa, synthetic construct; identical to SEQ ID NO: 1666

SEQ ID NO: 1677 - protein, 107 aa, synthetic construct
DIQMTQSPSSLSASVGDRVTITCRASQSITRYLNWYQQKPGKAPKLLIYTTSSLQSGVPSRFSGSGSGTDFTLTISSLQPEDFATYYCLQAYSTPWTFGQGTKVEIK

SEQ ID NO: 1678 - protein, 107 aa, synthetic construct
DIQMTQSPSSLSASVGDRVTITCRASEKISTYLNWYQQKPGKAPKLLIYAASSLQSGVPSRFSGSGSGTDFTLTISSLQPEDFATYYCQQSHQTPWTFGQGTKVEIK

SEQ ID NO: 1679 - protein, 108 aa, synthetic construct
EIVLTQSPATLSLSPGERATLSCRASQSVNSNHLAWYQQKPGQAPRLLIYSTSSRATGIPDRFSGSGSGTDFTLTISRLEPEDFAVYYCQQSGSSSLTFGQGTKVEIK

SEQ ID NO: 1680 - protein, 108 aa, synthetic construct
DIQMTQSPSSLSASVGDRVTITCRASQSISNYLNWYQQKPGKAPKLLIYGATSLQSGVPSRFSGSGSGTDFTLTISSLQPEDFATYYCQQSYIMSQWTFGQGTKVEIK

SEQ ID NO: 1681 - protein, 107 aa, synthetic construct
DIQMTQSPSSLSASVGDRVTITCRASQSITRYLNWYQQKPGKAPKLLIYGASSLQSGVPSRFSGSGSGTDFTLTISSLQPEDFATYYCQQGFRAPRTFGQGTKVEIK

SEQ ID NO: 1682 - protein, 107 aa, synthetic construct
DIQMTQSPSSLSASVGDRVTITCRASQSVGSYLNWYQQKPGKAPKLLIYSASSLQSGVPSRFSGSGSGTDFTLTISSLQPEDFATYYCQQSHATPWTFGQGTKVEIK

SEQ ID NO: 1683 - protein, 110 aa, synthetic construct
EIVLTQSPATLSLSPGERATLSCRASHSVSNNYLAWYQQKPGQAPRLLIYGASSRATGIPDRFSGSGSGTDFTLTISRLEPEDFAVYYCQLFDRSRPGYTFGQGTKVEIK

SEQ ID NO: 1684 - protein, 107 aa, synthetic construct; identical to SEQ ID NO: 1666

SEQ ID NO: 1685 - protein, 109 aa, synthetic construct
EIVLTQSPATLSLSPGERATLSCRASQSVSGTYLAWYQQKPGQAPRLLIYGASSRATGIPDRFSGSGSGTDFTLTISRLEPEDFAVYYCQQYKRSSGFTFGQGTKVEIK

SEQ ID NO: 1686 - protein, 373 aa, synthetic construct
MKHLWFFLLLVAAPRWVLSEVQLVESGGGLVQAGGSLRLSCAASGRTFSNYAMGWFRQAPGKEREFVAAITWSGTRTDYADSVKGRFTISADNAKNTVYLQMNSLKPEDTAVYYCAAAAWTIYEYDYWGQGTQVTVSSGGGGSEPKSSDKTHTCPPCPAPELLGGPSVFLFPPKPKDTLMISRTPEVTCVVVDVSHEDPEVKFNWYVDGVEVHNAKTKPREEQYNSTYRVVSVLTVLHQDWLNGKEYKCKVSNKALPAPIEKTISKAKGQPREPQVYTLPPSREEMTKNQVSLTCLVKGFYPSDIAVEWESNGQPENNYKTTPPVLDSDGSFFLYSLTVDKSRWQQGNVFSCSVMHEALHNHYTQKSLSLSPG

SEQ ID NO: 1687 - protein, 373 aa, synthetic construct
MKHLWFFLLLVAAPRWVLSEVQLVESGGGLVQAGGSLRLSCAASGRTFDIYAMGWFRQAPGKEREWVSTISWSGGRTYYADSVKGRFTISADNAKNTVYLQMNSLKPEDTAVYYCAARPVYRTYGSWGQGTQVTVSSGGGGSEPKSSDKTHTCPPCPAPELLGGPSVFLFPPKPKDTLMISRTPEVTCVVVDVSHEDPEVKFNWYVDGVEVHNAKTKPREEQYNSTYRVVSVLTVLHQDWLNGKEYKCKVSNKALPAPIEKTISKAKGQPREPQVYTLPPSREEMTKNQVSLTCLVKGFYPSDIAVEWESNGQPENNYKTTPPVLDSDGSFFLYSKLTVDKSRWQQGNVFSCSVMHEALHNHYTQKSLSLSPG

SEQ ID NO: 1688 - protein, 374 aa, synthetic construct
MKHLWFFLLLVAAPRWVLSEVQLVESGGGLVQAGGSLRLSCAASGFTFSSYAMGWFRQAPGKEREFVAAITWSGTRTDYADSVKGRFTISADNAKNTVYLQMNSLKPEDTAVYYCAAAAWRYSEYDYWGQGTQVTVSSGGGGSEPKSSDKTHTCPPCPAPELLGGPSVFLFPPKPKDTLMISRTPEVTCVVVDVSHEDPEVKFNWYVDGVEVHNAKTKPREEQYNSTYRVVSVLTVLHQDWLNGKEYKCKVSNKALPAPIEKTISKAKGQPREPQVYTLPPSREEMTKNQVSLTCLVKGFYPSDIAVEWESNGQPENNYKTTPPVLDSDGSFFLYSKLTVDKSRWQQGNVFSCSVMHEALHNHYTQKSLSLSPG

SEQ ID NO: 1689 - protein, 372 aa, synthetic construct
MKHLWFFLLLVAAPRWVLSEVQLVESGGGLVQAGGSLRLSCAASGSTFDTYVMGWFRQAPGKERELVSTISSDGDSTYYADSVKGRFTISADNAKNTVYLQMNSLKPEDTAVYYCAAGTRRGRNYWGQGTQVTVSSGGGGSEPKSSDKTHTCPPCPAPELLGGPSVFLFPPKPKDTLMISRTPEVTCVVVDVSHEDPEVKFNWYVDGVEVHNAKTKPREEQYNSTYRVVSVLTVLHQDWLNGKEYKCKVSNKALPAPIEKTISKAKGQPREPQVYTLPPSREEMTKNQVSLTCLVKGFYPSDIAVEWESNGQPENNYKTTPPVLDSDGSFFLYSKLTVDKSRWQQGNVFSCSVMHEALHNHYTQKSLSLSPG

SEQ ID NO: 1690 - protein, 373 aa, synthetic construct
MKHLWFFLLLVAAPRWVLSEVQLVESGGGLVQAGGSLRLSCAASGRTFSIYAMGWFRQAPGKEREWVATISSSGDRTYYADSVKGRFTISADNAKNTVYLQMNSLKPEDTAVYYCAARRYGRRYDYWGQGTQVTVSSGGGGSEPKSSDKTHTCPPCPAPELLGGPSVFLFPPKPKDTLMISRTPEVTCVVVDVSHEDPEVKFNWYVDGVEVHNAKTKPREEQYNSTYRVVSVLTVLHQDWLNGKEYKCKVSNKALPAPIEKTISKAKGQPREPQVYTLPPSREEMTKNQVSLTCLVKGFYPSDIAVEWESNGQPENNYKTTPPVLDSDGSFFLYSKLTVDKSRWQQGNVFSCSVMHEALHNHYTQKSLSLSPG

SEQ ID NO: 1691 - protein, 373 aa, synthetic construct
MKHLWFFLLLVAAPRWVLSEVQLVESGGGLVQAGGSLRLSCAASGGTFRSYVMGWFRQAPGKEREWVATINSSGSRTYYADSVKGRFTISADNAKNTVYLQMNSLKPEDTAVYYCAARPNYRDYEYWGQGTQVTVSSGGGGSEPKSSDKTHTCPPCPAPELLGGPSVFLFPPKPKDTLMISRTPEVTCVVVDVSHEDPEVKFNWYVDGVEVHNAKTKPREEQYNSTYRVVSVLTVLHQDWLNGKEYKCKVSNKALPAPIEKTISKAKGQPREPQVYTLPPSREEMTKNQVSLTCLVKGFYPSDIAVEWESNGQPENNYKTTPPVLDSDGSFFLYSKLTVDKSRWQQGNVFSCSVMHEALHNHYTQKSLSLSPG

SEQ ID NO: 1692 - protein, 374 aa, synthetic construct
MKHLWFFLLLVAAPRWVLSEVQLVESGGGLVQAGGSLRLSCAASGSIFSNYAMGWFRQAPGKEREFVATISRGGTRTNYADSVKGRFTISADNAKNTVYLQMNSLKPEDTAVYYCAAAAWTIYAYNYWGQGTQVTVSSGGGGSEPKSSDKTHTCPPCPAPELLGGPSVFLFPPKPKDTLMISRTPEVTCVVVDVSHEDPEVKFNWYVDGVEVHNAKTKPREEQYNSTYRVVSVLTVLHQDWLNGKEYKCKVSNKALPAPIEKTISKAKGQPREPQVYTLPPSREEMTKNQVSLTCLVKGFYPSDIAVEWESNGQPENNYKTTPPVLDSDGSFFLYSKLTVDKSRWQQGNVFSCSVMHEALHNHYTQKSLSLSPG

SEQ ID NO: 1693 - protein, 375 aa, synthetic construct
MKHLWFFLLLVAAPRWVLSEVQLVESGGGLVQAGGSLRLSCAASGRTLDDYVMGWFRQAPGKEREGVATISGGGDTTYYADSVKGRFTISADNAKNTVYLQMNSLKPEDTAVYYCAAVPWRWTTRRDYWGQGTQVTVSSGGGGSEPKSSDKTHTCPPCPAPELLGGPSVFLFPPKPKDTLMISRTPEVTCVVVDVSHEDPEVKFNWYVDGVEVHNAKTKPREEQYNSTYRVVSVLTVLHQDWLNGKEYKCKVSNKALPAPIEKTISKAKGQPREPQVYTLPPSREEMTKNQVSLTCLVKGFYPSDIAVEWESNGQPENNYKTTPPVLDSDGSFFLYSKLTVDKSRWQQGNVFSCSVMHEALHNHYTQKSLSLSPG

SEQ ID NO: 1694 - protein, 374 aa, synthetic construct
MKHLWFFLLLVAAPRWVLSEVQLVESGGGLVQAGGSLRLSCAASGFTFDNYAMGWFRQAPGKEREFVSSITWSGGRTSYADSVKGRFTISADNAKNTVYLQMNSLKPEDTAVYYCAANAWTIYRYDYWGQGTQVTVSSGGGGSEPKSSDKTHTCPPCPAPELLGGPSVFLFPPKPKDTLMISRTPEVTCVVVDVSHEDPEVKFNWYVDGVEVHNAKTKPREEQYNSTYRVVSVLTVLHQDWLNGKEYKCKVSNKALPAPIEKTISKAKGQPREPQVYTLPPSREEMTKNQVSLTCLVKGFYPSDIAVEWESNGQPENNYKTTPPVLDSDGSFFLYSKLTVDKSRWQQGNVFSCSVMHEALHNHYTQKSLSLSPG

SEQ ID NO: 1695 - protein, 379 aa, synthetic construct
MKHLWFFLLLVAAPRWVLSEVQLVESGGGLVQAGGSLRLSCAASGRTFSNYGMGWFRQAPGKEREFVSGISGSGGRTSYADSVKGRFTISADNAKNTVYLQMNSLKPEDTAVYYCAANLWYPVDRLNTGFNYWGQGTQVTVSSGGGGSEPKSSDKTHTCPPCPAPELLGGPSVFLFPPKPKDTLMISRTPEVTCVVVDVSHEDPEVKFNWYVDGVEVHNAKTKPREEQYNSTYRVVSVLTVLHQDWLNGKEYKCKVSNKALPAPIEKTISKAKGQPREPQVYTLPPSREEMTKNQVSLTCLVKGFYPSDIAVEWESNGQPENNYKTTPPVLDSDGSFFLYSKLTVDKSRWQQGNVFSCSVMHEALHNHYTQKSLSLSPG

SEQ ID NO: 1696 - protein, 377 aa, synthetic construct
MKHLWFFLLLVAAPRWVLSEVQLVESGGGLVQAGGSLRLSCAASGRTLSSYAMGWFRQAPGKEREFVASITWGGGRTYYADSVKGRFTISADNAKNTVYLQMNSLKPEDTAVYYCATRLWGTWTAGDYDYWGQGTQVTVSSGGGGSEPKSSDKTHTCPPCPAPELLGGPSVFLFPPKPKDTLMISRTPEVTCVVVDVSHEDPEVKFNWYVDGVEVHNAKTKPREEQYNSTYRVVSVLTVLHQDWLNGKEYKCKVSNKALPAPIEKTISKAKGQPREPQVYTLPPSREEMTKNQVSLTCLVKGFYPSDIAVEWESNGQPENNYKTTPPVLDSDGSFFLYSKLTVDKSRWQQGNVFSCSVMHEALHNHYTQKSLSLSPG

SEQ ID NO: 1697 - protein, 374 aa, synthetic construct
MKHLWFFLLLVAAPRWVLSEVQLVESGGGLVQAGGSLRLSCAASGSTFSSYAMGWFRQAPGKEREFVAAITWSGTRTNYADSVKGRFTISADNAKNTVYLQMNSLKPEDTAVYYCAAAAWTIYTYDSWGQGTQVTVSSGGGGSEPKSSDKTHTCPPCPAPELLGGPSVFLFPPKPKDTLMISRTPEVTCVVVDVSHEDPEVKFNWYVDGVEVHNAKTKPREEQYNSTYRVVSVLTVLHQDWLNGKEYKCKVSNKALPAPIEKTISKAKGQPREPQVYTLPPSREEMTKNQVSLTCLVKGFYPSDIAVEWESNGQPENNYKTTPPVLDSDGSFFLYSKLTVDKSRWQQGNVFSCSVMHEALHNHYTQKSLSLSPG

SEQ ID NO: 1698 - protein, 374 aa, synthetic construct
MKHLWFFLLLVAAPRWVLSEVQLVESGGGLVQAGGSLRLSCAASGFIFSNYAMGWFRQAPGKEREFVAAITWSGGRTYYADSVKGRFTISADNAKNTVYLQMNSLKPEDTAVYYCAAAAWTIYEYDYWGQGTQVTVSSGGGGSEPKSSDKTHTCPPCPAPELLGGPSVFLFPPKPKDTLMISRTPEVTCVVVDVSHEDPEVKFNWYVDGVEVHNAKTKPREEQYNSTYRVVSVLTVLHQDWLNGKEYKCKVSNKALPAPIEKTISKAKGQPREPQVYTLPPSREEMTKNQVSLTCLVKGFYPSDIAVEWESNGQPENNYKTTPPVLDSDGSFFLYSKLTVDKSRWQQGNVFSCSVMHEALHNHYTQKSLSLSPG

SEQ ID NO: 1699 - protein, 373 aa, synthetic construct
MKHLWFFLLLVAAPRWVLSEVQLVESGGGLVQAGGSLRLSCAASGFTFSDYVMGWFRQAPGKEREFVSAISWSGTNTNYADSVKGRFTISADNAKNTVYLQMNSLKPEDTAVYYCATRALRDGRGYWGQGTQVTVSSGGGGSEPKSSDKTHTCPPCPAPELLGGPSVFLFPPKPKDTLMISRTPEVTCVVVDVSHEDPEVKFNWYVDGVEVHNAKTKPREEQYNSTYRVVSVLTVLHQDWLNGKEYKCKVSNKALPAPIEKTISKAKGQPREPQVYTLPPSREEMTKNQVSLTCLVKGFYPSDIAVEWESNGQPENNYKTTPPVLDSDGSFFLYSKLTVDKSRWQQGNVFSCSVMHEALHNHYTQKSLSLSPG

SEQ ID NO: 1700 - protein, 374 aa, synthetic construct
MKHLWFFLLLVAAPRWVLSEVQLVESGGGLVQAGGSLRLSCAASGRTFDSYAMGWFRQAPGKEREGVATISGSGGRTYYADSVKGRFTISADNAKNTVYLQMNSLKPEDTAVYYCAAAAWTIYEFDSWGQGTQVTVTSGGGGSEPKSSDKTHTCPPCPAPELLGGPSVFLFPPKPKDTLMISRTPEVTCVVVDVSHEDPEVKFNWYVDGVEVHNAKTKPREEQYNSTYRVVSVLTVLHQDWLNGKEYKCKVSNKALPAPIEKTISKAKGQPREPQVYTLPPSREEMTKNQVSLTCLVKGFYPSDIAVEWESNGQPENNYKTTPPVLDSDGSFFLYSKLTVDKSRWQQGNVFSCSVMHEALHNHYTQKSLSLSPG

SEQ ID NO: 1701 - protein, 373 aa, synthetic construct
MKHLWFFLLLVAAPRWVLSEVQLVESGGGLVQAGGSLRLSCAASGSIFSIYAMGWFRQAPGKEREWVATISWGGNSTYYADSVKGRFTISADNAKNTVYLQMNSLKPEDTAVYYCAARPRFRTYGYWGQGTQVTVSSGGGGSEPKSSDKTHTCPPCPAPELLGGPSVFLFPPKPKDTLMISRTPEVTCVVVDVSHEDPEVKFNWYVDGVEVHNAKTKPREEQYNSTYRVVSVLTVLHQDWLNGKEYKCKVSNKALPAPIEKTISKAKGQPREPQVYTLPPSREEMTKNQVSLTCLVKGFYPSDIAVEWESNGQPENNYKTTPPVLDSDGSFFLYSKLTVDKSRWQQGNVFSCSVMHEALHNHYTQKSLSLSPG

SEQ ID NO: 1702 - protein, 372 aa, synthetic construct
MKHLWFFLLLVAAPRWVLSEVQLVESGGGLVQAGGSLRLSCAASGSTLSIYAMGWFRQAPGKERELVATISSGGGSTYYADSVKGRFTISADNAKNTVYLQMNSLKPEDTAVYYCAAGSVYGRNYWGQGTQVTVSSGGGGSEPKSSDKTHTCPPCPAPELLGGPSVFLFPPKPKDTLMISRTPEVTCVVVDVSHEDPEVKFNWYVDGVEVHNAKTKPREEQYNSTYRVVSVLTVLHQDWLNGKEYKCKVSNKALPAPIEKTISKAKGQPREPQVYTLPPSREEMTKNQVSLTCLVKGFYPSDIAVEWESNGQPENNYKTTPPVLDSDGSFFLYSKLTVDKSRWQQGNVFSCSVMHEALHNHYTQKSLSLSPG

SEQ ID NO: 1703 - protein, 377 aa, synthetic construct
MKHLWFFLLLVAAPRWVLSEVQLVESGGGLVQAGGSLRLSCAASGSTFSNYAMGWFRQAPGKEREFVSAINSSGSRTYYADSVKGRFTISADNAKNTVYLQMNSLKPEDTAVYYCAARLWGTWTAGDYDYWGQGTQVTVSSGGGGSEPKSSDKTHTCPPCPAPELLGGPSVFLFPPKPKDTLMISRTPEVTCVVVDVSHEDPEVKFNWYVDGVEVHNAKTKPREEQYNSTYRVVSVLTVLHQDWLNGKEYKCKVSNKALPAPIEKTISKAKGQPREPQVYTLPPSREEMTKNQVSLTCLVKGFYPSDIAVEWESNGQPENNYKTTPPVLDSDGSFFLYSKLTVDKSRWQQGNVFSCSVMHEALHNHYTQKSLSLSPG

SEQ ID NO: 1704 - protein, 374 aa, synthetic construct
MKHLWFFLLLVAAPRWVLSEVQLVESGGGLVQAGGSLRLSCAASGRTFSSYAMGWFRQAPGKEREFVATISGSFGRTYYADSVKGRFTISADNAKNTVYLQMNSLKPEDTAVYYCAAGAWTIYEYDYWGQGTQVTVSSGGGGSEPKSSDKTHTCPPCPAPELLGGPSVFLFPPKPKDTLMISRTPEVTCVVVDVSHEDPEVKFNWYVDGVEVHNAKTKPREEQYNSTYRVVSVLTVLHQDWLNGKEYKCKVSNKALPAPIEKTISKAKGQPREPQVYTLPPSREEMTKNQVSLTCLVKGFYPSDIAVEWESNGQPENNYKTTPPVLDSDGSFFLYSKLTVDKSRWQQGNVFSCSVMHEALHNHYTQKSLSLSPG

SEQ ID NO: 1705 - protein, 372 aa, synthetic construct
MKHLWFFLLLVAAPRWVLSEVQLVESGGGLVQAGGSLRLSCAASGSTFSIYAMGWFRQAPGKERELVASISWSGDTTNYADSVKGRFTISADNAKNTVYLQMNSLKPEDTAVYYCAAGSVYGRNSWGQGTQVTVTSGGGGSEPKSSDKTHTCPPCPAPELLGGPSVFLFPPKPKDTLMISRTPEVTCVVVDVSHEDPEVKFNWYVDGVEVHNAKTKPREEQYNSTYRVVSVLTVLHQDWLNGKEYKCKVSNKALPAPIEKTISKAKGQPREPQVYTLPPSREEMTKNQVSLTCLVKGFYPSDIAVEWESNGQPENNYKTTPPVLDSDGSFFLYSKLTVDKSRWQQGNVFSCSVMHEALHNHYTQKSLSLSPG

SEQ ID NO: 1706 - protein, 374 aa, synthetic construct
MKHLWFFLLLVAAPRWVLSEVQLVESGGGLVQAGGSLRLSCAASGSTFSNYAMGWFRQAPGKERELVSAITWSSSRTYYADSVKGRFTISADNAKNTVYLQMNSLKPEDTAVYYCAAAAWTIYNFEYWGQGTQVTVSSGGGGSEPKSSDKTHTCPPCPAPELLGGPSVFLFPPKPKDTLMISRTPEVTCVVVDVSHEDPEVKFNWYVDGVEVHNAKTKPREEQYNSTYRVVSVLTVLHQDWLNGKEYKCKVSNKALPAPIEKTISKAKGQPREPQVYTLPPSREEMTKNQVSLTCLVKGFYPSDIAVEWESNGQPENNYKTTPPVLDSDGSFFLYSKLTVDKSRWQQGNVFSCSVMHEALHNHYTQKSLSLSPG

SEQ ID NO: 1707 - protein, 377 aa, synthetic construct
MKHLWFFLLLVAAPRWVLSEVQLVESGGGLVQAGGSLRLSCAASGSILSSYTMGWFRQAPGKEREFVSTISRSSTRTYYADSVKGRFTISADNAKNTVYLQMNSLKPEDTAVYYCAARLWGTWTAGDYDYWGQGTQVTVSSGGGGSEPKSSDKTHTCPPCPAPELLGGPSVFLFPPKPKDTLMISRTPEVTCVVVDVSHEDPEVKFNWYVDGVEVHNAKTKPREEQYNSTYRVVSVLTVLHQDWLNGKEYKCKVSNKALPAPIEKTISKAKGQPREPQVYTLPPSREEMTKNQVSLTCLVKGFYPSDIAVEWESNGQPENNYKTTPPVLDSDGSFFLYSKLTVDKSRWQQGNVFSCSVMHEALHNHYTQKSLSLSPG

SEQ ID NO: 1708 - protein, 372 aa, synthetic construct
MKHLWFFLLLVAAPRWVLSEVQLVESGGGLVQAGGSLRLSCAASGSTFDIYAMGWFRQAPGKEREFVASISSGDTNTNYADSVKGRFTISADNAKNTVYLQMNSLKHEDTAVYYCAAGRYSGYNSWGQGTQVTVSSGGGGSEPKSSDKTHTCPPCPAPELLGGPSVFLFPPKPKDTLMISRTPEVTCVVVDVSHEDPEVKFNWYVDGVEVHNAKTKPREEQYNSTYRVVSVLTVLHQDWLNGKEYKCKVSNKALPAPIEKTISKAKGQPREPQVYTLPPSREEMTKNQVSLTCLVKGFYPSDIAVEWESNGQPENNYKTTPPVLDSDGSFFLYSKLTVDKSRWQQGNVFSCSVMHEALHNHYTQKSLSLSPG

SEQ ID NO: 1709 - protein, 372 aa, synthetic construct
MKHLWFFLLLVAAPRWVLSEVQLVESGGGLVQAGGSLRLSCAASGRTFDTYAMGWLRQAPGKEREFVSAISTGDGSTNYADSVKGRFTISADNAKNTVYLQMNSLKPEDTAVYYCAAARRSGRGSWGQGTQVTVTSGGGGSEPKSSDKTHTCPPCPAPELLGGPSVFLFPPKPKDTLMISRTPEVTCVVVDVSHEDPEVKFNWYVDGVEVHNAKTKPREEQYNSTYRVVSVLTVLHQDWLNGKEYKCKVSNKALPAPIEKTISKAKGQPREPQVYTLPPSREEMTKNQVSLTCLVKGFYPSDIAVEWESNGQPENNYKTTPPVLDSDGSFFLYSKLTVDKSRWQQGNVFSCSVMHEALHNHYTQKSLSLSPG

SEQ ID NO: 1710 - protein, 374 aa, synthetic construct
MKHLWFFLLLVAAPRWVLSEVQLVESGGGLVQAGGSLRLSCAASGFTFDNYAMGWFRQAPGKEREGVAAITWSGGRTYYADSVKGRFTISADNAKNTVYLQMNSLKPEDTAVYYCAAAAWTIYEYDSWGQGTQVTVTSGGGGSEPKSSDKTHTCPPCPAPELLGGPSVFLFPPKPKDTLMISRTPEVTCVVVDVSHEDPEVKFNWYVDGVEVHNAKTKPREEQYNSTYRVVSVLTVLHQDWLNGKEYKCKVSNKALPAPIEKTISKAKGQPREPQVYTLPPSREEMTKNQVSLTCLVKGFYPSDIAVEWESNGQPENNYKTTPPVLDSDGSFFLYSKLTVDKSRWQQGNVFSCSVMHEALHNHYTQKSLSLSPG

SEQ ID NO: 1711 - protein, 374 aa, synthetic construct
MKHLWFFLLLVAAPRWVLSEVQLVESGGGLVQAGGSLRLSCAASGFTFDNYAMGWFRQAPGKEREFVATITWSGTRTNYADSVKGRFTISADNAKNTVYLQMNSLKPEDTAVYYCAAAAWTIYDYDYWGQGTQVTVSSGGGGSEPKSSDKTHTCPPCPAPELLGGPSVFLFPPKPKDTLMISRTPEVTCVVVDVSHEDPEVKFNWYVDGVEVHNAKTKPREEQYNSTYRVVSVLTVLHQDWLNGKEYKCKVSNKALPAPIEKTISKAKGQPREPQVYTLPPSREEMTKNQVSLTCLVKGFYPSDIAVEWESNGQPENNYKTTPPVLDSDGSFFLYSKLTVDKSRWQQGNVFSCSVMHEALHNHYTQKSLSLSPG

SEQ ID NO: 1712 - protein, 374 aa, synthetic construct
MKHLWFFLLLVAAPRWVLSEVQLVESGGGLVQAGGSLRLSCAASGRTFSNNVMGWFRQAPGKEREFVAAISWGGASTNYADSVKGRFTISADNAKNTVYLQMNSLKPEDTAVYYCAAGPKTPDTRNYWGQGTQVTVSSGGGGSEPKSSDKTHTCPPCPAPELLGGPSVFLFPPKPKDTLMISRTPEVTCVVVDVSHEDPEVKFNWYVDGVEVHNAKTKPREEQYNSTYRVVSVLTVLHQDWLNGKEYKCKVSNKALPAPIEKTISKAKGQPREPQVYTLPPSREEMTKNQVSLTCLVKGFYPSDIAVEWESNGQPENNYKTTPPVLDSDGSFFLYSKLTVDKSRWQQGNVFSCSVMHEALHNHYTQKSLSLSPG

SEQ ID NO: 1713 - protein, 373 aa, synthetic construct
MKHLWFFLLLVAAPRWVLSEVQLVESGGGLVQAGGSLRLSCAASGFIFDSYAMGWFRQAPGKEREFVAAISWGGSNTNYADSVKGRFTISADNAKNTVYLQMNSLKPEDTAVYYCAAVRITDGRDYWGQGTQVTVSSGGGGSEPKSSDKTHTCPPCPAPELLGGPSVFLFPPKPKDTLMISRTPEVTCVVVDVSHEDPEVKFNWYVDGVEVHNAKTKPREEQYNSTYRVVSVLTVLHQDWLNGKEYKCKVSNKALPAPIEKTISKAKGQPREPQVYTLPPSREEMTKNQVSLTCLVKGFYPSDIAVEWESNGQPENNYKTTPPVLDSDGSFFLYSKLTVDKSRWQQGNVFSCSVMHEALHNHYTQKSLSLSPG

SEQ ID NO: 1714 - protein, 374 aa, synthetic construct
MKHLWFFLLLVAAPRWVLSEVQLVESGGGLVQAGGSLRLSCAASGRTFSNYAMGWFRQAPGKEREFVAAITWSGTRTDYADSVKGRFTISADNAKNTVYLQMNSLKPEDTAVYYCAAAAWTIYEYDYWGQGTQVTVSSGGGGSEPKSSDKTHTCPPCPAPELLGGPSVFLFPPKPKDTLMISRTPEVTCVVVDVSHEDPEVKFNWYVDGVEVHNAKTKPREEQYNSTYRVVSVLTVLHQDWLNGKEYKCKVSNKALPAPIEKTISKAKGQPREPQVYTLPPSREEMTKNQVSLTCLVKGFYPSDIAVEWESNGQPENNYKTTPPVLDSDGSFFLYSKLTVDKSRWQQGNVFSCSVMHEALHNHYTQKSLSLSPG

SEQ ID NO: 1715 - protein, 374 aa, synthetic construct; identical to SEQ ID NO: 1688

SEQ ID NO: 1716 - protein, 373 aa, synthetic construct
MKHLWFFLLLVAAPRWVLSEVQLVESGGGLVQAGGSLRLSCAASGFTFSIYAMGWFRQAPGKEREWVSTISWSGGNTYYADSVKGRFTISADNAKNTVYLQMNSLKPEDTAVYYCATRPRFRRYDSWGQGTQVTVSSGGGGSEPKSSDKTHTCPPCPAPELLGGPSVFLFPPKPKDTLMISRTPEVTCVVVDVSHEDPEVKFNWYVDGVEVHNAKTKPREEQYNSTYRVVSVLTVLHQDWLNGKEYKCKVSNKALPAPIEKTISKAKGQPREPQVYTLPPSREEMTKNQVSLTCLVKGFYPSDIAVEWESNGQPENNYKTTPPVLDSDGSFFLYSKLTVDKSRWQQGNVFSCSVMHEALHNHYTQKSLSLSPG

SEQ ID NO: 1717 - protein, 378 aa, synthetic construct
MKHLWFFLLLVAAPRWVLSEVQLVESGGGLVQAGGSLRLSCAASGSTFDSYAMGWFRQAPGKEREGVAAITTSGSSTYYADSVKGRFTISADNAKNTVYLQMNSLKPEDTAVYYCAARGGVRSGSPGTYNYWGQGTQVTVSSGGGGSEPKSSDKTHTCPPCPAPELLGGPSVFLFPPKPKDTLMISRTPEVTCVVVDVSHEDPEVKFNWYVDGVEVHNAKTKPREEQYNSTYRVVSVLTVLHQDWLNGKEYKCKVSNKALPAPIEKTISKAKGQPREPQVYTLPPSREEMTKNQVSLTCLVKGFYPSDIAVEWESNGQPENNYKTTPPVLDSDGSFFLYSKLTVDKSRWQQGNVFSCSVMHEALHNHYTQKSLSLSPG

SEQ ID NO: 1718 - protein, 374 aa, synthetic construct
MKHLWFFLLLVAAPRWVLSEVQLVESGGGLVQAGGSLRLSCAASGFIFSTYAMGWFRQAPGKERELVSAITRSGITTYYADSVKGRFTISADNAKNTVYLQMNSLKPEDTAVYYCAAAAWTIYEYDYWGQGTQVTVSSGGGGSEPKSSDKTHTCPPCPAPELLGGPSVFLFPPKPKDTLMISRTPEVTCVVVDVSHEDPEVKFNWYVDGVEVHNAKTKPREEQYNSTYRVVSVLTVLHQDWLNGKEYKCKVSNKALPAPIEKTISKAKGQPREPQVYTLPPSREEMTKNQVSLTCLVKGFYPSDIAVEWESNGQPENNYKTTPPVLDSDGSFFLYSKLTVDKSRWQQGNVFSCSVMHEALHNHYTQKSLSLSPG

SEQ ID NO: 1719 - protein, 377 aa, synthetic construct
MKHLWFFLLLVAAPRWVLSEVQLVESGGGLVQAGGSLRLSCAASGFTFRNYAMGWFRQAPGKEREFVSSISSSSSRTSYADSVKGRFTISADNAKNTVYLQMNSLKPEDTAVYYCAARLWGTWTAGDYDYWGQGTQVTVSSGGGGSEPKSSDKTHTCPPCPAPELLGGPSVFLFPPKPKDTLMISRTPEVTCVVVDVSHEDPEVKFNWYVDGVEVHNAKTKPREEQYNSTYRVVSVLTVLHQDWLNGKEYKCKVSNKALPAPIEKTISKAKGQPREPQVYTLPPSREEMTKNQVSLTCLVKGFYPSDIAVEWESNGQPENNYKTTPPVLDSDGSFFLYSKLTVDKSRWQQGNVFSCSVMHEALHNHYTQKSLSLSPG

SEQ ID NO: 1720 - protein, 373 aa, synthetic construct
MKHLWFFLLLVAAPRWVLSEVQLVESGGGLVQAGGSLRLSCAASGRIFSIYTMGWFRQAPGKEREWVATINSSGSRTYYADSVKGRFTISADNAKNTVYLQMNSLKPEDTAVYYCAARPSYNRYDSWGQGTQVTVSSGGGGSEPKSSDKTHTCPPCPAPELLGGPSVFLFPPKPKDTLMISRTPEVTCVVVDVSHEDPEVKFNWYVDGVEVHNAKTKPREEQYNSTYRVVSVLTVLHQDWLNGKEYKCKVSNKALPAPIEKTISKAKGQPREPQVYTLPPSREEMTKNQVSLTCLVKGFYPSDIAVEWESNGQPENNYKTTPPVLDSDGSFFLYSKLTVDKSRWQQGNVFSCSVMHEALHNHYTQKSLSLSPG

SEQ ID NO: 1721 - protein, 374 aa, synthetic construct
MKHLWFFLLLVAAPRWVLSEVQLVESGGGLVQAGGSLRLSCAASGFTFSSYAMGWFRQAPGKEREFVASITWSGTSTNYADSVKGRFTISADNAKNTVYLQMNSLKPEDTAVYYCAAAAWTIYAYDYWGQGTQVTVSSGGGGSEPKSSDKTHTCPPCPAPELLGGPSVFLFPPKPKDTLMISRTPEVTCVVVDVSHEDPEVKFNWYVDGVEVHNAKTKPREEQYNSTYRVVSVLTVLHQDWLNGKEYKCKVSNKALPAPIEKTISKAKGQPREPQVYTLPPSREEMTKNQVSLTCLVKGFYPSDIAVEWESNGQPENNYKTTPPVLDSDGSFFLYSKLTVDKSRWQQGNVFSCSVMHEALHNHYTQKSLSLSPG

SEQ ID NO: 1722 - protein, 374 aa, synthetic construct
MKHLWFFLLLVAAPRWVLSEVQLVESGGGLVQAGGSLRLSCAASGRTFSNYAMGWFRQAPGKEREFVAGISWSGTRTYYADSVKGRFTISADNAKNTVYLQMNSLKPEDTAVYYCAAAAWTIYEYDYWGQGTQVTVSSGGGGSEPKSSDKTHTCPPCPAPELLGGPSVFLFPPKPKDTLMISRTPEVTCVVVDVSHEDPEVKFNWYVDGVEVHNAKTKPREEQYNSTYRVVSVLTVLHQDWLNGKEYKCKVSNKALPAPIEKTISKAKGQPREPQVYTLPPSREEMTKNQVSLTCLVKGFYPSDIAVEWESNGQPENNYKTTPPVLDSDGSFFLYSKLTVDKSRWQQGNVFSCSVMHEALHNHYTQKSLSLSPG

SEQ ID NO: 1723 - protein, 371 aa, synthetic construct
MKHLWFFLLLVAAPRWVLSEVQLVESGGGLVQAGGSLRLSCAASGSTFSSYAMGWFRQAPGKEREFVSAISRNGASTSYADSVKGRFTISADNAKNTVYLQMNSLKPEDTAVYYCAAAGTRFDYWGQGTQVTVSSGGGGSEPKSSDKTHTCPPCPAPELLGGPSVFLFPPKPKDTLMISRTPEVTCVVVDVSHEDPEVKFNWYVDGVEVHNAKTKPREEQYNSTYRVVSVLTVLHQDWLNGKEYKCKVSNKALPAPIEKTISKAKGQPREPQVYTLPPSREEMTKNQVSLTCLVKGFYPSDIAVEWESNGQPENNYKTTPPVLDSDGSFFLYSKLTVDKSRWQQGNVFSCSVMHEALHNHYTQKSLSLSPG

SEQ ID NO: 1724 - protein, 375 aa, synthetic construct; identical to SEQ ID NO: 1693

SEQ ID NO: 1725 - protein, 374 aa, synthetic construct; identical to SEQ ID NO: 1711

SEQ ID NO: 1726 - protein, 374 aa, synthetic construct
MKHLWFFLLLVAAPRWVLSEVQLVESGGGLVQAGGSLRLSCAASGRTFSTNAMGWFRQAPGKEREWVTAITTSGGNTYYADSVKGRFTISADNAKNTVYLQMNSLKPEDTAVYYCAARDETYGTYDYWGQGTQVTVSSGGGGSEPKSSDKTHTCPPCPAPELLGGPSVFLFPPKPKDTLMISRTPEVTCVVVDVSHEDPEVKFNWYVDGVEVHNAKTKPREEQYNSTYRVVSVLTVLHQDWLNGKEYKCKVSNKALPAPIEKTISKAKGQPREPQVYTLPPSREEMTKNQVSLTCLVKGFYPSDIAVEWESNGQPENNYKTTPPVLDSDGSFFLYSKLTVDKSRWQQGNVFSCSVMHEALHNHYTQKSLSLSPG

SEQ ID NO: 1727 - protein, 377 aa, synthetic construct
MKHLWFFLLLVAAPRWVLSEVQLVESGGGLVQAGGSLRLSCAASGSTFSTYAMGWFRQAPGKEREFVATISTSSSRTYYADSVKGRFTISADNAKNTVYLQMNSLKPEDTAVYYCAARLWGTWTAGDYDYWGQGTQVTVSLGGGGSEPKSSDKTHTCPPCPAPELLGGPSVFLFPPKPKDTLMISRTPEVTCVVVDVSHEDPEVKFNWYVDGVEVHNAKTKPREEQYNSTYRVVSVLTVLHQDWLNGKEYKCKVSNKALPAPIEKTISKAKGQPREPQVYTLPPSREEMTKNQVSLTCLVKGFYPSDIAVEWESNGQPENNYKTTPPVLDSDGSFFLYSKLTVDKSRWQQGNVFSCSVMHEALHNHYTQKSLSLSPG

SEQ ID NO: 1728 - protein, 373 aa, synthetic construct
MKHLWFFLLLVAAPRWVLSEVQLVESGGGLVQAGGSLRLSCAASGRTFDSYAMGWFRQAPGKEREWVSAISWSGSSTYYADSVKGRFTISADNAKNTVYLQMNSLKPEDTAVYYCAARGGYGRYDSWGQGTQVTVTSGGGGSEPKSSDKTHTCPPCPAPELLGGPSVFLFPPKPKDTLMISRTPEVTCVVVDVSHEDPEVKFNWYVDGVEVHNAKTKPREEQYNSTYRVVSVLTVLHQDWLNGKEYKCKVSNKALPAPIEKTISKAKGQPREPQVYTLPPSREEMTKNQVSLTCLVKGFYPSDIAVEWESNGQPENNYKTTPPVLDSDGSFFLYSKLTVDKSRWQQGNVFSCSVMHEALHNHYTQKSLSLSPG

SEQ ID NO: 1729 - protein, 374 aa, synthetic construct
MKHLWFFLLLVAAPRWVLSEVQLVESGGGLVQAGGSLRLSCAASGFTFDNYAMGWFRQAPGKEREFVATITWSGTTTNYADSVKGRFTISADNAKNTVYLQMNSLKPEDTAVYYCAAAAWTIYDYDYWGQGTQVTVSSGGGGSEPKSSDKTHTCPPCPAPELLGGPSVFLFPPKPKDTLMISRTPEVTCVVVDVSHEDPEVKFNWYVDGVEVHNAKTKPREEQYNSTYRVVSVLTVLHQDWLNGKEYKCKVSNKALPAPIEKTISKAKGQPREPQVYTLPPSREEMTKNQVSLTCLVKGFYPSDIAVEWESNGQPENNYKTTPPVLDSDGSFFLYSKLTVDKSRWQQGNVFSCSVMHEALHNHYTQKSLSLSPG

SEQ ID NO: 1730 - protein, 374 aa, synthetic construct
MKHLWFFLLLVAAPRWVLSEVQLVESGGGLVQAGGSLRLSCAASGFTFSSYAMGWFRQAPGKEREFVASITWSGTRTDYADSVKGRFTISADNAKNTVYLQMNSLKPEDTAVYYCAAAAWTIYGYEYWGQGTQVTVSSGGGGSEPKSSDKTHTCPPCPAPELLGGPSVFLFPPKPKDTLMISRTPEVTCVVVDVSHEDPEVKFNWYVDGVEVHNAKTKPREEQYNSTYRVVSVLTVLHQDWLNGKEYKCKVSNKALPAPIEKTISKAKGQPREPQVYTLPPSREEMTKNQVSLTCLVKGFYPSDIAVEWESNGQPENNYKTTPPVLDSDGSFFLYSKLTVDKSRWQQGNVFSCSVMHEALHNHYTQKSLSLSPG

SEQ ID NO: 1731 - protein, 372 aa, synthetic construct
MKHLWFFLLLVAAPRWVLSEVQLVESGGGLVQAGGSLRLSCAASGSTFDIYAMGWFRQAPGKEREFVASISSGDTNTYYADSVKGRFTISADNAKNTVYLQMNSLKHEDTAVYYCAAGRYSGYNSWGQGTQVTVSSGGGGSEPKSSDKTHTCPPCPAPELLGGPSVFLFPPKPKDTLMISRTPEVTCVVVDVSHEDPEVKFNWYVDGVEVHNAKTKPREEQYNSTYRVVSVLTVLHQDWLNGKEYKCKVSNKALPAPIEKTISKAKGQPREPQVYTLPPSREEMTKNQVSLTCLVKGFYPSDIAVEWESNGQPENNYKTTPPVLDSDGSFFLYSKLTVDKSRWQQGNVFSCSVMHEALHNHYTQKSLSLSPG

SEQ ID NO: 1732 - protein, 382 aa, synthetic construct
MKHLWFFLLLVAAPRWVLSEVQLVESGGGLVQAGGSLRLSCAASGSTLSSYAMGWFRQAPGKERELVAAITGSGGRTYYADSVKGRFTISADNAKNTVYLQMNSLKPEDTAVYYCAANRRYSFPYWSFWYDDFDYWGQGTQVTVSSGGGGSEPKSSDKTHTCPPCPAPELLGGPSVFLFPPKPKDTLMISRTPEVTCVVVDVSHEDPEVKFNWYVDGVEVHNAKTKPREEQYNSTYRVVSVLTVLHQDWLNGKEYKCKVSNKALPAPIEKTISKAKGQPREPQVYTLPPSREEMTKNQVSLTCLVKGFYPSDIAVEWESNGQPENNYKTTPPVLDSDGSFFLYSKLTVDKSRWQQGNVFSCSVMHEALHNHYTQKSLSLSPG

SEQ ID NO: 1733 - protein, 373 aa, synthetic construct
MKHLWFFLLLVAAPRWVLSEVQLVESGGGLVQAGGSLRLSCAASGFAFSSYWMGWFRQAPGKERELVAARNSGGNTNYADSVKGRFTISADNAKNTVYLQMNSLKPEDTAVYYCAADVWYGSTWRNWGQGTQVTVSSGGGGSEPKSSDKTHTCPPCPAPELLGGPSVFLFPPKPKDTLMISRTPEVTCVVVDVSHEDPEVKFNWYVDGVEVHNAKTKPREEQYNSTYRVVSVLTVLHQDWLNGKEYKCKVSNKALPAPIEKTISKAKGQPREPQVYTLPPSREEMTKNQVSLTCLVKGFYPSDIAVEWESNGQPENNYKTTPPVLDSDGSFFLYSKLTVDKSRWQQGNVFSCSVMHEALHNHYTQKSLSLSPG

SEQ ID NO: 1734 - protein, 371 aa, synthetic construct
MKHLWFFLLLVAAPRWVLSEVQLVESGGGLVQAGGSLRLSCAASGRTFGDYIMGWFRQAPGKERELVATISGGGSTNYADSVKGRFTISADNAKNTVYLQMNSLKPEDTAVYYCAAVFSRGPLTWGQGTQVTVSSGGGGSEPKSSDKTHTCPPCPAPELLGGPSVFLFPPKPKDTLMISRTPEVTCVVVDVSHEDPEVKFNWYVDGVEVHNAKTKPREEQYNSTYRVVSVLTVLHQDWLNGKEYKCKVSNKALPAPIEKTISKAKGQPREPQVYTLPPSREEMTKNQVSLTCLVKGFYPSDIAVEWESNGQPENNYKTTPPVLDSDGSFFLYSKLTVDKSRWQQGNVFSCSVMHEALHNHYTQKSLSLSPG

SEQ ID NO: 1735 - protein, 371 aa, synthetic construct
MKHLWFFLLLVAAPRWVLSEVQLVESGGGLVQAGGSLRLSCAASGNIFSRYIMGWFRQAPGKEREWVAGISNGGTTKYADSVKGRFTISADNAKNTVYLQMNSLKPEDTAVYYCAQGWKIRPTIWGQGTQVTVSSGGGGSEPKSSDKTHTCPPCPAPELLGGPSVFLFPPKPKDTLMISRTPEVTCVVVDVSHEDPEVKFNWYVDGVEVHNAKTKPREEQYNSTYRVVSVLTVLHQDWLNGKEYKCKVSNKALPAPIEKTISKAKGQPREPQVYTLPPSREEMTKNQVSLTCLVKGFYPSDIAVEWESNGQPENNYKTTPPVLDSDGSFFLYSKLTVDKSRWQQGNVFSCSVMHEALHNHYTQKSLSLSPG

SEQ ID NO: 1736 - protein, 373 aa, synthetic construct
MKHLWFFLLLVAAPRWVLSEVQLVESGGGLVQAGGSLRLSCAASGFTFSTHWMGWFRQAPGKERELVAARNSGGNTNYADSVKGRFTISADNAKNTVYLQMNSLKPEDTAVYYCAADVWYGSTWRNWGQGTQVTVSSGGGGSEPKSSDKTHTCPPCPAPELLGGPSVFLFPPKPKDTLMISRTPEVTCVVVDVSHEDPEVKFNWYVDGVEVHNAKTKPREEQYNSTYRVVSVLTVLHQDWLNGKEYKCKVSNKALPAPIEKTISKAKGQPREPQVYTLPPSREEMTKNQVSLTCLVKGFYPSDIAVEWESNGQPENNYKTTPPVLDSDGSFFLYSKLTVDKSRWQQGNVFSCSVMHEALHNHYTQKSLSLSPG

SEQ ID NO: 1737 - protein, 378 aa, synthetic construct
MKHLWFFLLLVAAPRWVLSEVQLVESGGGLVQAGGSLRLSCAASGGTFRNYGMGWFRQAPGKERELVAAISWSGVSTIYADSVKGRFTISADNAKNTVYLQMNSLKPEDTAVYYCASSPYGPLYRSTHYYDWGQGTQVTVSSGGGGSEPKSSDKTHTCPPCPAPELLGGPSVFLFPPKPKDTLMISRTPEVTCVVVDVSHEDPEVKFNWYVDGVEVHNAKTKPREEQYNSTYRVVSVLTVLHQDWLNGKEYKCKVSNKALPAPIEKTISKAKGQPREPQVYTLPPSREEMTKNQVSLTCLVKGFYPSDIAVEWESNGQPENNYKTTPPVLDSDGSFFLYSKLTVDKSRWQQGNVFSCSVMHEALHNHYTQKSLSLSPG

SEQ ID NO: 1738 - protein, 370 aa, synthetic construct
MKHLWFFLLLVAAPRWVLSEVQLVESGGGLVQAGGSLRLSCAASGRFSRINSMGWFRQAPGKERELVAHIFRSGITSYASYADSVKGRFTISADNAKNTVYLQMNSLKPEDTAVYYCAIGRGSWGQGTQVTVSSGGGGSEPKSSDKTHTCPPCPAPELLGGPSVFLFPPKPKDTLMISRTPEVTCVVVDVSHEDPEVKFNWYVDGVEVHNAKTKPREEQYNSTYRVVSVLTVLHQDWLNGKEYKCKVSNKALPAPIEKTISKAKGQPREPQVYTLPPSREEMTKNQVSLTCLVKGFYPSDIAVEWESNGQPENNYKTTPPVLDSDGSFFLYSKLTVDKSRWQQGNVFSCSVMHEALHNHYTQKSLSLSPG

SEQ ID NO: 1739 - protein, 371 aa, synthetic construct
MKHLWFFLLLVAAPRWVLSEVQLVESGGGLVQAGGSLRLSCAASGIPASIRTMGWFRQAPGKEREGISLITSDDGSTYYADSVKGRFTISADNAKNTVYLQMNSLKPEDTAVYYCAWTTNRGMDWGQGTQVTVSSGGGGSEPKSSDKTHTCPPCPAPELLGGPSVFLFPPKPKDTLMISRTPEVTCVVVDVSHEDPEVKFNWYVDGVEVHNAKTKPREEQYNSTYRVVSVLTVLHQDWLNGKEYKCKVSNKALPAPIEKTISKAKGQPREPQVYTLPPSREEMTKNQVSLTCLVKGFYPSDIAVEWESNGQPENNYKTTPPVLDSDGSFFLYSKLTVDKSRWQQGNVFSCSVMHEALHNHYTQKSLSLSPG

SEQ ID NO: 1740 - protein, 373 aa, synthetic construct
MKHLWFFLLLVAAPRWVLSEVQLVESGGGLVQAGGSLRLSCAASGFTMSSSWMGWFRQAPGKEREFVATLTSGGSTNYADSVKGRFTISADNAKNTVYLQMNSLKPEDTAVYYCAADVWYGSTWRNWGQGTQVTVSSGGGGSEPKSSDKTHTCPPCPAPELLGGPSVFLFPPKPKDTLMISRTPEVTCVVVDVSHEDPEVKFNWYVDGVEVHNAKTKPREEQYNSTYRVVSVLTVLHQDWLNGKEYKCKVSNKALPAPIEKTISKAKGQPREPQVYTLPPSREEMTKNQVSLTCLVKGFYPSDIAVEWESNGQPENNYKTTPPVLDSDGSFFLYSKLTVDKSRWQQGNVFSCSVMHEALHNHYTQKSLSLSPG

SEQ ID NO: 1741 - protein, 380 aa, synthetic construct
MKHLWFFLLLVAAPRWVLSEVQLVESGGGLVQAGGSLRLSCAASGPISGINRMGWFRQAPGKEREWVSTITFNGDHTYYADSVKGRFTISADNAKNTVYLQMNSLKPEDTAVYYCAARPYTRPGSMWVSSLYDWGQGTQVTVSSGGGGSEPKSSDKTHTCPPCPAPELLGGPSVFLFPPKPKDTLMISRTPEVTCVVVDVSHEDPEVKFNWYVDGVEVHNAKTKPREEQYNSTYRVVSVLTVLHQDWLNGKEYKCKVSNKALPAPIEKTISKAKGQPREPQVYTLPPSREEMTKNQVSLTCLVKGFYPSDIAVEWESNGQPENNYKTTPPVLDSDGSFFLYSKLTVDKSRWQQGNVFSCSVMHEALHNHYTQKSLSLSPG

SEQ ID NO: 1742 - protein, 373 aa, synthetic construct
MKHLWFFLLLVAAPRWVLSEVQLVESGGGLVQAGGSLRLSCAASVRTFSLSDMGWFRQAPGKEREFVGAINWLSESTYYADSVKGRFTISADNAKNTVYLQMNSLKPEDTAVYYCAAQGGVLSGWDWGQGTQVTVSSGGGGSEPKSSDKTHTCPPCPAPELLGGPSVFLFPPKPKDTLMISRTPEVTCVVVDVSHEDPEVKFNWYVDGVEVHNAKTKPREEQYNSTYRVVSVLTVLHQDWLNGKEYKCKVSNKALPAPIEKTISKAKGQPREPQVYTLPPSREEMTKNQVSLTCLVKGFYPSDIAVEWESNGQPENNYKTTPPVLDSDGSFFLYSKLTVDKSRWQQGNVFSCSVMHEALHNHYTQKSLSLSPG

SEQ ID NO: 1743 - protein, 371 aa, synthetic construct
MKHLWFFLLLVAAPRWVLSEVQLVESGGGLVQAGGSLRLSCAASGSITSIRSMGWFRQAPGKEREWVSSVYIFGGSTYYADSVKGRFTISADNAKNTVYLQMNSLKPEDTAVYYCANSNKPKFDWGQGTQVTVSSGGGGSEPKSSDKTHTCPPCPAPELLGGPSVFLFPPKPKDTLMISRTPEVTCVVVDVSHEDPEVKFNWYVDGVEVHNAKTKPREEQYNSTYRVVSVLTVLHQDWLNGKEYKCKVSNKALPAPIEKTISKAKGQPREPQVYTLPPSREEMTKNQVSLTCLVKGFYPSDIAVEWESNGQPENNYKTTPPVLDSDGSFFLYSKLTVDKSRWQQGNVFSCSVMHEALHNHYTQKSLSLSPG

SEQ ID NO: 1744 - protein, 371 aa, synthetic construct
MKHLWFFLLLVAAPRWVLSEVQLVESGGGLVQAGGSLRLSCAASGRTFGDYIMGWFRQAPGKERELVASVSGGGNSDYADSVKGRFTISADNAKNTVYLQMNSLKPEDTAVYYCAAVFSRGPLTWGQGTQVTVSSGGGGSEPKSSDKTHTCPPCPAPELLGGPSVFLFPPKPKDTLMISRTPEVTCVVVDVSHEDPEVKFNWYVDGVEVHNAKTKPREEQYNSTYRVVSVLTVLHQDWLNGKEYKCKVSNKALPAPIEKTISKAKGQPREPQVYTLPPSREEMTKNQVSLTCLVKGFYPSDIAVEWESNGQPENNYKTTPPVLDSDGSFFLYSKLTVDKSRWQQGNVFSCSVMHEALHNHYTQKSLSLSPG

SEQ ID NO: 1745 - protein, 367 aa, synthetic construct
MKHLWFFLLLVAAPRWVLSEVQLVESGGGLVQAGGSLRLSCAASGRTFSNYFMGWFRQAPGKERESVAAINWDSARTYYADSVKGRFTISADNAKNTVYLQMNSLKPEDTAVYYCASAGRWGQGTQVTVSSGGGGSEPKSSDKTHTCPPCPAPELLGGPSVFLFPPKPKDTLMISRTPEVTCVVVDVSHEDPEVKFNWYVDGVEVHNAKTKPREEQYNSTYRVVSVLTVLHQDWLNGKEYKCKVSNKALPAPIEKTISKAKGQPREPQVYTLPPSREEMTKNQVSLTCLVKGFYPSDIAVEWESNGQPENNYKTTPPVLDSDGSFFLYSKLTVDKSRWQQGNVFSCSVMHEALHNHYTQKSLSLSPG

SEQ ID NO: 1746 - protein, 376 aa, synthetic construct
MKHLWFFLLLVAAPRWVLSEVQLVESGGGLVQAGGSLRLSCAASGPTFSIYDMGWFRQAPGKEREFVAAITWNSGRTNYADSVKGRFTISADNAKNTVYLQMNSLKPEDTAVYYCAAGAWSSLRKTAASWGQGTQVTVSSGGGGSEPKSSDKTHTCPPCPAPELLGGPSVFLFPPKPKDTLMISRTPEVTCVVVDVSHEDPEVKFNWYVDGVEVHNAKTKPREEQYNSTYRVVSVLTVLHQDWLNGKEYKCKVSNKALPAPIEKTISKAKGQPREPQVYTLPPSREEMTKNQVSLTCLVKGFYPSDIAVEWESNGQPENNYKTTPPVLDSDGSFFLYSKLTVDKSRWQQGNVFSCSVMHEALHNHYTQKSLSLSPG

SEQ ID NO: 1747 - protein, 374 aa, synthetic construct
MKHLWFFLLLVAAPRWVLSEVQLVESGGGLVQAGGSLRLSCAASGFTFSGNWMGWFRQAPGKEREWVSGISSGGGRTYYADSVKGRFTISADNAKNTVYLQMNSLKPEDTAVYYCAADVWYGSTWRNWGQGTQVTVSSGGGGSEPKSSDKTHTCPPCPAPELLGGPSVFLFPPKPKDTLMISRTPEVTCVVVDVSHEDPEVKFNWYVDGVEVHNAKTKPREEQYNSTYRVVSVLTVLHQDWLNGKEYKCKVSNKALPAPIEKTISKAKGQPREPQVYTLPPSREEMTKNQVSLTCLVKGFYPSDIAVEWESNGQPENNYKTTPPVLDSDGSFFLYSKLTVDKSRWQQGNVFSCSVMHEALHNHYTQKSLSLSPG

SEQ ID NO: 1748 - protein, 368 aa, synthetic construct
MKHLWFFLLLVAAPRWVLSEVQLVESGGGLVQAGGSLRLSCAASGFPFSEYPMGWFRQAPGKEREFVAVVNWNGDSTYYADSVKGRFTISADNAKNTVYLQMNSLKPEDTAVYYCANFNRDWGQGTQVTVSSGGGGSEPKSSDKTHTCPPCPAPELLGGPSVFLFPPKPKDTLMISRTPEVTCVVVDVSHEDPEVKFNWYVDGVEVHNAKTKPREEQYNSTYRVVSVLTVLHQDWLNGKEYKCKVSNKALPAPIEKTISKAKGQPREPQVYTLPPSREEMTKNQVSLTCLVKGFYPSDIAVEWESNGQPENNYKTTPPVLDSDGSFFLYSKLTVDKSRWQQGNVFSCSVMHEALHNHYTQKSLSLSPG

SEQ ID NO: 1749 - protein, 369 aa, synthetic construct
MKHLWFFLLLVAAPRWVLSEVQLVESGGGLVQAGGSLRLSCAASGSIFNIGMGWFRQAPGKEREWVSSIYSNGHTYYADSVKGRFTISADNAKNTVYLQMNSLKPEDTAVYYCANSNKPKFDWGQGTQVTVSSGGGGSEPKSSDKTHTCPPCPAPELLGGPSVFLFPPKPKDTLMISRTPEVTCVVVDVSHEDPEVKFNWYVDGVEVHNAKTKPREEQYNSTYRVVSVLTVLHQDWLNGKEYKCKVSNKALPAPIEKTISKAKGQPREPQVYTLPPSREEMTKNQVSLTCLVKGFYPSDIAVEWESNGQPENNYKTTPPVLDSDGSFFLYSKLTVDKSRWQQGNVFSCSVMHEALHNHYTQKSLSLSPG

SEQ ID NO: 1750 - protein, 371 aa, synthetic construct
MKHLWFFLLLVAAPRWVLSEVQLVESGGGLVQAGGSLRLSCAASGRAFSLRTMGWFRQAPGKEREGISLITSDDGSTYYADSVKGRFTISADNAKNTVYLQMNSLKPEDTAVYYCAWTTNRGMDWGQGTQVTVSSGGGGSEPKSSDKTHTCPPCPAPELLGGPSVFLFPPKPKDTLMISRTPEVTCVVVDVSHEDPEVKFNWYVDGVEVHNAKTKPREEQYNSTYRVVSVLTVLHQDWLNGKEYKCKVSNKALPAPIEKTISKAKGQPREPQVYTLPPSREEMTKNQVSLTCLVKGFYPSDIAVEWESNGQPENNYKTTPPVLDSDGSFFLYSKLTVDKSRWQQGNVFSCSVMHEALHNHYTQKSLSLSPG

SEQ ID NO: 1751 - protein, 373 aa, synthetic construct
MKHLWFFLLLVAAPRWVLSEVQLVESGGGLVQAGGSLRLSCAASGRTFSSYAMMGWFRQAPGKEREFLAIITDGSKTLYADSVKGRFTISADNAKNTVYLQMNSLKPEDTAVYYCAAQFTLARHLVWGQGTQVTVSSGGGGSEPKSSDKTHTCPPCPAPELLGGPSVFLFPPKPKDTLMISRTPEVTCVVVDVSHEDPEVKFNWYVDGVEVHNAKTKPREEQYNSTYRVVSVLTVLHQDWLNGKEYKCKVSNKALPAPIEKTISKAKGQPREPQVYTLPPSREEMTKNQVSLTCLVKGFYPSDIAVEWESNGQPENNYKTTPPVLDSDGSFFLYSKLTVDKSRWQQGNVFSCSVMHEALHNHYTQKSLSLSPG

SEQ ID NO: 1752 - protein, 376 aa, synthetic construct
MKHLWFFLLLVAAPRWVLSEVQLVESGGGLVQAGGSLRLSCAASGPTFSIYDMGWFRQAPGKEREFVAVINWSRGSTFYADSVKGRFTISADNAKNTVYLQMNSLKPEDTAVYYCAAGVWSSLRHTAANWGQGTQVTVSSGGGGSEPKSSDKTHTCPPCPAPELLGGPSVFLFPPKPKDTLMISRTPEVTCVVVDVSHEDPEVKFNWYVDGVEVHNAKTKPREEQYNSTYRVVSVLTVLHQDWLNGKEYKCKVSNKALPAPIEKTISKAKGQPREPQVYTLPPSREEMTKNQVSLTCLVKGFYPSDIAVEWESNGQPENNYKTTPPVLDSDGSFFLYSKLTVDKSRWQQGNVFSCSVMHEALHNHYTQKSLSLSPG

SEQ ID NO: 1753 - protein, 373 aa, synthetic construct
MKHLWFFLLLVAAPRWVLSEVQLVESGGGLVQAGGSLRLSCAASGFTFSTSWMGWFRQAPGKERELVATINSGGGTNYADSVKGRFTISADNAKNTVYLQMNSLKPEDTAVYYCAADVWYGSTWRNWGQGTQVTVSSGGGGSEPKSSDKTHTCPPCPAPELLGGPSVFLFPPKPKDTLMISRTPEVTCVVVDVSHEDPEVKFNWYVDGVEVHNAKTKPREEQYNSTYRVVSVLTVLHQDWLNGKEYKCKVSNKALPAPIEKTISKAKGQPREPQVYTLPPSREEMTKNQVSLTCLVKGFYPSDIAVEWESNGQPENNYKTTPPVLDSDGSFFLYSKLTVDKSRWQQGNVFSCSVMHEALHNHYTQKSLSLSPG

SEQ ID NO: 1754 - protein, 374 aa, synthetic construct
MKHLWFFLLLVAAPRWVLSEVQLVESGGGLVQAGGSLRLSCAASGFTLSGNWMGWFRQAPGKEREFVASISSSGVSKHYADSVKGRFTISADNAKNTVYLQMNSLKPEDTAVYYCAADVWYGSTWRNWGRGTQVTVSSGGGGSEPKSSDKTHTCPPCPAPELLGGPSVFLFPPKPKDTLMISRTPEVTCVVVDVSHEDPEVKFNWYVDGVEVHNAKTKPREEQYNSTYRVVSVLTVLHQDWLNGKEYKCKVSNKALPAPIEKTISKAKGQPREPQVYTLPPSREEMTKNQVSLTCLVKGFYPSDIAVEWESNGQPENNYKTTPPVLDSDGSFFLYSKLTVDKSRWQQGNVFSCSVMHEALHNHYTQKSLSLSPG

SEQ ID NO: 1755 - protein, 371 aa, synthetic construct
MKHLWFFLLLVAAPRWVLSEVQLVESGGGLVQAGGSLRLSCAASGRAFRRYTMGWFRQAPGKEREFVAAIRWSGGTTFYADSVKGRFTISADNAKNTVYLQMNSLKPEDTAVYYCAAEWAAMKDWGQGTQVTVSSGGGGSEPKSSDKTHTCPPCPAPELLGGPSVFLFPPKPKDTLMISRTPEVTCVVVDVSHEDPEVKFNWYVDGVEVHNAKTKPREEQYNSTYRVVSVLTVLHQDWLNGKEYKCKVSNKALPAPIEKTISKAKGQPREPQVYTLPPSREEMTKNQVSLTCLVKGFYPSDIAVEWESNGQPENNYKTTPPVLDSDGSFFLYSKLTVDKSRWQQGNVFSCSVMHEALHNHYTQKSLSLSPG

SEQ ID NO: 1756 - protein, 371 aa, synthetic construct
MKHLWFFLLLVAAPRWVLSEVQLVESGGGLVQAGGSLRLSCAASGNIFSRYIMGWFRQAPGKEREWVAGISNGGTTKYADSVKGRFTISADNAKNTVYLQMNSLKPEDTAVYYCAQGWKIIPTDWGQGTQVTVSSGGGGSEPKSSDKTHTCPPCPAPELLGGPSVFLFPPKPKDTLMISRTPEVTCVVVDVSHEDPEVKFNWYVDGVEVHNAKTKPREEQYNSTYRVVSVLTVLHQDWLNGKEYKCKVSNKALPAPIEKTISKAKGQPREPQVYTLPPSREEMTKNQVSLTCLVKGFYPSDIAVEWESNGQPENNYKTTPPVLDSDGSFFLYSKLTVDKSRWQQGNVFSCSVMHEALHNHYTQKSLSLSPG

SEQ ID NO: 1757 - protein, 376 aa, synthetic construct
MKHLWFFLLLVAAPRWVLSEVQLVESGGGLVQAGGSLRLSCAASGPTFSIYDMGWFRQAPGKEREFVASTIWSRGDTYYADSVKGRFTISADNAKNTVYLQMNSLKPEDTAVYYCAAGVWSSLRHTAANWGQGTQVTVSSGGGGSEPKSSDKTHTCPPCPAPELLGGPSVFLFPPKPKDTLMISRTPEVTCVVVDVSHEDPEVKFNWYVDGVEVHNAKTKPREEQYNSTYRVVSVLTVLHQDWLNGKEYKCKVSNKALPAPIEKTISKAKGQPREPQVYTLPPSREEMTKNQVSLTCLVKGFYPSDIAVEWESNGQPENNYKTTPPVLDSDGSFFLYSKLTVDKSRWQQGNVFSCSVMHEALHNHYTQKSLSLSPG

SEQ ID NO: 1758 - protein, 370 aa, synthetic construct
MKHLWFFLLLVAAPRWVLSEVQLVESGGGLVQAGGSLRLSCAASGRTYYAMGWFRQAPGKEREFLAIITDGSKTLYADSVKGRFTISADNAKNTVYLQMNSLKPEDTAVYYCAAQFTLARHLVWGQGTQVTVSSGGGGSEPKSSDKTHTCPPCPAPELLGGPSVFLFPPKPKDTLMISRTPEVTCVVVDVSHEDPEVKFNWYVDGVEVHNAKTKPREEQYNSTYRVVSVLTVLHQDWLNGKEYKCKVSNKALPAPIEKTISKAKGQPREPQVYTLPPSREEMTKNQVSLTCLVKGFYPSDIAVEWESNGQPENNYKTTPPVLDSDGSFFLYSKLTVDKSRWQQGNVFSCSVMHEALHNHYTQKSLSLSPG

SEQ ID NO: 1759 - protein, 373 aa, synthetic construct
MKHLWFFLLLVAAPRWVLSEVQLVESGGGLVQAGGSLRLSCAASGFTFSTSWMGWFRQAPGKEREFVAGILSDGRELYADSVKGRFTISADNAKNTVYLQMNSLKPEDTAVYYCAADVWYGSTWRNWGQGTQVTVSSGGGGSEPKSSDKTHTCPPCPAPELLGGPSVFLFPPKPKDTLMISRTPEVTCVVVDVSHEDPEVKFNWYVDGVEVHNAKTKPREEQYNSTYRVVSVLTVLHQDWLNGKEYKCKVSNKALPAPIEKTISKAKGQPREPQVYTLPPSREEMTKNQVSLTCLVKGFYPSDIAVEWESNGQPENNYKTTPPVLDSDGSFFLYSKLTVDKSRWQQGNVFSCSVMHEALHNHYTQKSLSLSPG

SEQ ID NO: 1760 - protein, 373 aa, synthetic construct
MKHLWFFLLLVAAPRWVLSEVQLVESGGGLVQAGGSLRLSCAASGRTFESYRMGWFRQAPGKEREFVGGINWSGRTYYADSVKGRFTISADNAKNTVYLQMNSLKPEDTAVYYCAARRLYSGSYLDWGQGTQVTVSSGGGGSEPKSSDKTHTCPPCPAPELLGGPSVFLFPPKPKDTLMISRTPEVTCVVVDVSHEDPEVKFNWYVDGVEVHNAKTKPREEQYNSTYRVVSVLTVLHQDWLNGKEYKCKVSNKALPAPIEKTISKAKGQPREPQVYTLPPSREEMTKNQVSLTCLVKGFYPSDIAVEWESNGQPENNYKTTPPVLDSDGSFFLYSKLTVDKSRWQQGNVFSCSVMHEALHNHYTQKSLSLSPG

SEQ ID NO: 1761 - protein, 371 aa, synthetic construct
MKHLWFFLLLVAAPRWVLSEVQLVESGGGLVQAGGSLRLSCAASGSSLSFNAMGWFRQAPGKEREWVSSVYIFGGSTYYADSVKGRFTISADNAKNTVYLQMNSLKPEDTAVYYCANSNKPKFDWGQGTQVTVSSGGGGSEPKSSDKTHTCPPCPAPELLGGPSVFLFPPKPKDTLMISRTPEVTCVVVDVSHEDPEVKFNWYVDGVEVHNAKTKPREEQYNSTYRVVSVLTVLHQDWLNGKEYKCKVSNKALPAPIEKTISKAKGQPREPQVYTLPPSREEMTKNQVSLTCLVKGFYPSDIAVEWESNGQPENNYKTTPPVLDSDGSFFLYSKLTVDKSRWQQGNVFSCSVMHEALHNHYTQKSLSLSPG

SEQ ID NO: 1762 - protein, 371 aa, synthetic construct
MKHLWFFLLLVAAPRWVLSEVQLVESGGGLVQAGGSLRLSCAASGGTFSGRGMGWFRQAPGKEREWVSSVYIFGGSTYYADSVKGRFTISADNAKNTVYLQMNSLKPEDTAVYYCANSNKPKFDWGQGTQVTVSSGGGGSEPKSSDKTHTCPPCPAPELLGGPSVFLFPPKPKDTLMISRTPEVTCVVVDVSHEDPEVKFNWYVDGVEVHNAKTKPREEQYNSTYRVVSVLTVLHQDWLNGKEYKCKVSNKALPAPIEKTISKAKGQPREPQVYTLPPSREEMTKNQVSLTCLVKGFYPSDIAVEWESNGQPENNYKTTPPVLDSDGSFFLYSKLTVDKSRWQQGNVFSCSVMHEALHNHYTQKSLSLSPG

SEQ ID NO: 1763 - protein, 372 aa, synthetic construct
MKHLWFFLLLVAAPRWVLSEVQLVESGGGLVQAGGSLRLSCAASGPTFSWTMMGWFRQAPGKEREFLAIITDGSKTLYADSVKGRFTISADNAKNTVYLQMNSLKPEDTAVYYCAAQFTLARHLVWGQGTQVTVSSGGGGSEPKSSDKTHTCPPCPAPELLGGPSVFLFPPKPKDTLMISRTPEVTCVVVDVSHEDPEVKFNWYVDGVEVHNAKTKPREEQYNSTYRVVSVLTVLHQDWLNGKEYKCKVSNKALPAPIEKTISKAKGQPREPQVYTLPPSREEMTKNQVSLTCLVKGFYPSDIAVEWESNGQPENNYKTTPPVLDSDGSFFLYSKLTVDKSRWQQGNVFSCSVMHEALHNHYTQKSLSLSPG

SEQ ID NO: 1764 - protein, 371 aa, synthetic construct
MKHLWFFLLLVAAPRWVLSEVQLVESGGGLVQAGGSLRLSCAASGIIGTIRTMGWFRQAPGKEREGISLITSDDGSTYYADSVKGRFTISADNAKNTVYLQMNSLKPEDTAVYYCAWTTNRGMDWGQGTQVTVSSGGGGSEPKSSDKTHTCPPCPAPELLGGPSVFLFPPKPKDTLMISRTPEVTCVVVDVSHEDPEVKFNWYVDGVEVHNAKTKPREEQYNSTYRVVSVLTVLHQDWLNGKEYKCKVSNKALPAPIEKTISKAKGQPREPQVYTLPPSREEMTKNQVSLTCLVKGFYPSDIAVEWESNGQPENNYKTTPPVLDSDGSFFLYSKLTVDKSRWQQGNVFSCSVMHEALHNHYTQKSLSLSPG

SEQ ID NO: 1765 - protein, 370 aa, synthetic construct
MKHLWFFLLLVAAPRWVLSEVQLVESGGGLVQAGGSLRLSCAASGFTLENNMMGWFRQAPGKERELVSAIGWSGASTYYADSVKGRFTISADNAKNTVYLQMNSLKPEDTAVYYCAANLRGDNWGQGTQVTVSSGGGGSEPKSSDKTHTCPPCPAPELLGGPSVFLFPPKPKDTLMISRTPEVTCVVVDVSHEDPEVKFNWYVDGVEVHNAKTKPREEQYNSTYRVVSVLTVLHQDWLNGKEYKCKVSNKALPAPIEKTISKAKGQPREPQVYTLPPSREEMTKNQVSLTCLVKGFYPSDIAVEWESNGQPENNYKTTPPVLDSDGSFFLYSKLTVDKSRWQQGNVFSCSVMHEALHNHYTQKSLSLSPG

SEQ ID NO: 1766 - protein, 371 aa, synthetic construct
MKHLWFFLLLVAAPRWVLSEVQLVESGGGLVQAGGSLRLSCAASGNIFSRYIMGWFRQAPGKEREWVAGISSGGTTKYADSVKGRFTISADNAKNTVYLQMNSLKPEDTAVYYCAQGWKIVPTNWGQGTQVTVSSGGGGSEPKSSDKTHTCPPCPAPELLGGPSVFLFPPKPKDTLMISRTPEVTCVVVDVSHEDPEVKFNWYVDGVEVHNAKTKPREEQYNSTYRVVSVLTVLHQDWLNGKEYKCKVSNKALPAPIEKTISKAKGQPREPQVYTLPPSREEMTKNQVSLTCLVKGFYPSDIAVEWESNGQPENNYKTTPPVLDSDGSFFLYSKLTVDKSRWQQGNVFSCSVMHEALHNHYTQKSLSLSPG

SEQ ID NO: 1767 - protein, 377 aa, synthetic construct
MKHLWFFLLLVAAPRWVLSEVQLVESGGGLVQAGGSLRLSCAASGNIDRLYAMGWFRQAPGKEREGISLITSDDGSTYYADSVKGRFTISADNAKNTVYLQMNSLKPEDTAVYYCASSGPADARNGERWAWGQGTQVTVSSGGGGSEPKSSDKTHTCPPCPAPELLGGPSVFLFPPKPKDTLMISRTPEVTCVVVDVSHEDPEVKFNWYVDGVEVHNAKTKPREEQYNSTYRVVSVLTVLHQDWLNGKEYKCKVSNKALPAPIEKTISKAKGQPREPQVYTLPPSREEMTKNQVSLTCLVKGFYPSDIAVEWESNGQPENNYKTTPPVLDSDGSFFLYSKLTVDKSRWQQGNVFSCSVMHEALHNHYTQKSLSLSPG

SEQ ID NO: 1768 - protein, 371 aa, synthetic construct
MKHLWFFLLLVAAPRWVLSEVQLVESGGGLVQAGGSLRLSCAASGSIASIHAIGWFRQAPGKEREWVSSVYIFGGSTYYADSVKGRFTISADNAKNTVYLQMNSLKPEDTAVYYCANSNKPKFDWGQGTQVTVSSGGGGSEPKSSDKTHTCPPCPAPELLGGPSVFLFPPKPKDTLMISRTPEVTCVVVDVSHEDPEVKFNWYVDGVEVHNAKTKPREEQYNSTYRVVSVLTVLHQDWLNGKEYKCKVSNKALPAPIEKTISKAKGQPREPQVYTLPPSREEMTKNQVSLTCLVKGFYPSDIAVEWESNGQPENNYKTTPPVLDSDGSFFLYSKLTVDKSRWQQGNVFSCSVMHEALHNHYTQKSLSLSPG

SEQ ID NO: 1769 - protein, 371 aa, synthetic construct
MKHLWFFLLLVAAPRWVLSEVQLVESGGGLVQAGGSLRLSCAASGRTFSSKAMGWFRQAPGKEREWVSSVYIFGGSTYYADSVKGRFTISADNAKNTVYLQMNSLKPEDTAVYYCANSNKPKFDWGQGTQVTVSSGGGGSEPKSSDKTHTCPPCPAPELLGGPSVFLFPPKPKDTLMISRTPEVTCVVVDVSHEDPEVKFNWYVDGVEVHNAKTKPREEQYNSTYRVVSVLTVLHQDWLNGKEYKCKVSNKALPAPIEKTISKAKGQPREPQVYTLPPSREEMTKNQVSLTCLVKGFYPSDIAVEWESNGQPENNYKTTPPVLDSDGSFFLYSKLTVDKSRWQQGNVFSCSVMHEALHNHYTQKSLSLSPG

SEQ ID NO: 1770 - protein, 371 aa, synthetic construct
MKHLWFFLLLVAAPRWVLSEVQLVESGGGLVQAGGSLRLSCAASGSIASFNAMGWFRQAPGKEREWVSSVYIFGGSTYYADSVKGRFTISADNAKNTVYLQMNSLKPEDTAVYYCANSNKPKFDWGQGTQVTVSSGGGGSEPKSSDKTHTCPPCPAPELLGGPSVFLFPPKPKDTLMISRTPEVTCVVVDVSHEDPEVKFNWYVDGVEVHNAKTKPREEQYNSTYRVVSVLTVLHQDWLNGKEYKCKVSNKALPAPIEKTISKAKGQPREPQVYTLPPSREEMTKNQVSLTCLVKGFYPSDIAVEWESNGQPENNYKTTPPVLDSDGSFFLYSKLTVDKSRWQQGNVFSCSVMHEALHNHYTQKSLSLSPG

SEQ ID NO: 1771 - protein, 373 aa, synthetic construct
MKHLWFFLLLVAAPRWVLSEVQLVESGGGLVQAGGSLRLSCAASGFTFSTSWMGWFRQAPGKEREWVVGISSGGSTHYADSVKGRFTISADNAKNTVYLQMNSLKPEDTAVYYCAADVWYGSTWRNWGQGTQVTVSSGGGGSEPKSSDKTHTCPPCPAPELLGGPSVFLFPPKPKDTLMISRTPEVTCVVVDVSHEDPEVKFNWYVDGVEVHNAKTKPREEQYNSTYRVVSVLTVLHQDWLNGKEYKCKVSNKALPAPIEKTISKAKGQPREPQVYTLPPSREEMTKNQVSLTCLVKGFYPSDIAVEWESNGQPENNYKTTPPVLDSDGSFFLYSKLTVDKSRWQQGNVFSCSVMHEALHNHYTQKSLSLSPG

SEQ ID NO: 1772 - protein, 373 aa, synthetic construct
MKHLWFFLLLVAAPRWVLSEVQLVESGGGLVQAGGSLRLSCAASGFTFSGNWMGWFRQAPGKEREWVVGISSGGSTHYADSVKGRFTISADNAKNTVYLQMNSLKPEDTAVYYCAADVWYGSTWRNWGQGTQVTVSSGGGGSEPKSSDKTHTCPPCPAPELLGGPSVFLFPPKPKDTLMISRTPEVTCVVVDVSHEDPEVKFNWYVDGVEVHNAKTKPREEQYNSTYRVVSVLTVLHQDWLNGKEYKCKVSNKALPAPIEKTISKAKGQPREPQVYTLPPSREEMTKNQVSLTCLVKGFYPSDIAVEWESNGQPENNYKTTPPVLDSDGSFFLYSKLTVDKSRWQQGNVFSCSVMHEALHNHYTQKSLSLSPG

SEQ ID NO: 1773 - protein, 373 aa, synthetic construct
MKHLWFFLLLVAAPRWVLSEVQLVESGGGLVQAGGSLRLSCAASGRTFSSYAMMGWFRQAPGKEREFLAIITDGSKTLYADSVKGRFTISADNAKNTVYLQMNSLKPEDTAVYYCAAQFILARHLVWGQGTQVTVSSGGGGSEPKSSDKTHTCPPCPAPELLGGPSVFLFPPKPKDTLMISRTPEVTCVVVDVSHEDPEVKFNWYVDGVEVHNAKTKPREEQYNSTYRVVSVLTVLHQDWLNGKEYKCKVSNKALPAPIEKTISKAKGQPREPQVYTLPPSREEMTKNQVSLTCLVKGFYPSDIAVEWESNGQPENNYKTTPPVLDSDGSFFLYSKLTVDKSRWQQGNVFSCSVMHEALHNHYTQKSLSLSPG

SEQ ID NO: 1774 - protein, 370 aa, synthetic construct
MKHLWFFLLLVAAPRWVLSEVQLVESGGGLVQAGGSLRLSCAASGITITTEVMGWFRQAPGKEREYVAAIHWNGDSTAYADSVKGRFTISADNAKNTVYLQMNSLKPEDTAVYYCAQVSQWRAWGQGTQVTVSSGGGGSEPKSSDKTHTCPPCPAPELLGGPSVFLFPPKPKDTLMISRTPEVTCVVVDVSHEDPEVKFNWYVDGVEVHNAKTKPREEQYNSTYRVVSVLTVLHQDWLNGKEYKCKVSNKALPAPIEKTISKAKGQPREPQVYTLPPSREEMTKNQVSLTCLVKGFYPSDIAVEWESNGQPENNYKTTPPVLDSDGSFFLYSKLTVDKSRWQQGNVFSCSVMHEALHNHYTQKSLSLSPG

SEQ ID NO: 1775 - protein, 373 aa, synthetic construct
MKHLWFFLLLVAAPRWVLSEVQLVESGGGLVQAGGSLRLSCAASGFTFSTSWMGWFRQAPGKERELVAARNSGGNTNYADSVKGRFTISADNAKNTVYLQMNSLKPEDTAVYYCAADVWYGSTWRNWGQGTQVTVSSGGGGSEPKSSDKTHTCPPCPAPELLGGPSVFLFPPKPKDTLMISRTPEVTCVVVDVSHEDPEVKFNWYVDGVEVHNAKTKPREEQYNSTYRVVSVLTVLHQDWLNGKEYKCKVSNKALPAPIEKTISKAKGQPREPQVYTLPPSREEMTKNQVSLTCLVKGFYPSDIAVEWESNGQPENNYKTTPPVLDSDGSFFLYSKLTVDKSRWQQGNVFSCSVMHEALHNHYTQKSLSLSPG

SEQ ID NO: 1776 - protein, 374 aa, synthetic construct
MKHLWFFLLLVAAPRWVLSEVQLVESGGGLVQAGGSLRLSCAASGVTLDLYAMGWFRQAPGKEREFVAGIWRSGGSTVYADSVKGRFTISADNAKNTVYLQMNSLKPEDTAVYYCATWTTTWGRNRDWGQGTQVTVSSGGGGSEPKSSDKTHTCPPCPAPELLGGPSVFLFPPKPKDTLMISRTPEVTCVVVDVSHEDPEVKFNWYVDGVEVHNAKTKPREEQYNSTYRVVSVLTVLHQDWLNGKEYKCKVSNKALPAPIEKTISKAKGQPREPQVYTLPPSREEMTKNQVSLTCLVKGFYPSDIAVEWESNGQPENNYKTTPPVLDSDGSFFLYSKLTVDKSRWQQGNVFSCSVMHEALHNHYTQKSLSLSPG

SEQ ID NO: 1777 - protein, 368 aa, synthetic construct
MKHLWFFLLLVAAPRWVLSEVQLVESGGGLVQAGGSLRLSCAASGGTFSGGFMGWFRQAPGKEREWVASVLRGGYTWYADSVKGRFTISADNAKNTVYLQMNSLKPEDTAVYYCANGGSSYWGQGTQVTVSSGGGGSEPKSSDKTHTCPPCPAPELLGGPSVFLFPPKPKDTLMISRTPEVTCVVVDVSHEDPEVKFNWYVDGVEVHNAKTKPREEQYNSTYRVVSVLTVLHQDWLNGKEYKCKVSNKALPAPIEKTISKAKGQPREPQVYTLPPSREEMTKNQVSLTCLVKGFYPSDIAVEWESNGQPENNYKTTPPVLDSDGSFFLYSKLTVDKSRWQQGNVFSCSVMHEALHNHYTQKSLSLSPG

SEQ ID NO: 1778 - protein, 372 aa, synthetic construct
MKHLWFFLLLVAAPRWVLSEVQLVESGGGLVQAGGSLRLSCAASGRTFSTYASMWWFRQAPGKEREFLAIITDGSKTLYADSVKGRFTISADNAKNTVYLQMNSLKPEDTAVYYCAGSWSYPGLTWGQGTQVTVSSGGGGSEPKSSDKTHTCPPCPAPELLGGPSVFLFPPKPKDTLMISRTPEVTCVVVDVSHEDPEVKFNWYVDGVEVHNAKTKPREEQYNSTYRVVSVLTVLHQDWLNGKEYKCKVSNKALPAPIEKTISKAKGQPREPQVYTLPPSREEMTKNQVSLTCLVKGFYPSDIAVEWESNGQPENNYKTTPPVLDSDGSFFLYSKLTVDKSRWQQGNVFSCSVMHEALHNHYTQKSLSLSPG

SEQ ID NO: 1779 - protein, 373 aa, synthetic construct
MKHLWFFLLLVAAPRWVLSEVQLVESGGGLVQAGGSLRLSCAASGFTMSSSWMGWFRQAPGKEREWVVGISSGGSTHYADSVKGRFTISADNAKNTVYLQMNSLKPEDTAVYYCAADVWYGSTWRNWGQGTQVTVSSGGGGSEPKSSDKTHTCPPCPAPELLGGPSVFLFPPKPKDTLMISRTPEVTCVVVDVSHEDPEVKFNWYVDGVEVHNAKTKPREEQYNSTYRVVSVLTVLHQDWLNGKEYKCKVSNKALPAPIEKTISKAKGQPREPQVYTLPPSREEMTKNQVSLTCLVKGFYPSDIAVEWESNGQPENNYKTTPPVLDSDGSFFLYSKLTVDKSRWQQGNVFSCSVMHEALHNHYTQKSLSLSPG

SEQ ID NO: 1780 - protein, 378 aa, synthetic construct
MKHLWFFLLLVAAPRWVLSEVQLVESGGGLVQAGGSLRLSCAASGFPVNRYSMGWFRQAPGKERELVSAIGWSGASTYYADSVKGRFTISADNAKNTVYLQMNSLKPEDTAVYYCAADFWLARLRVADDYDWGQGTQVTVSSGGGGSEPKSSDKTHTCPPCPAPELLGGPSVFLFPPKPKDTLMISRTPEVTCVVVDVSHEDPEVKFNWYVDGVEVHNAKTKPREEQYNSTYRVVSVLTVLHQDWLNGKEYKCKVSNKALPAPIEKTISKAKGQPREPQVYTLPPSREEMTKNQVSLTCLVKGFYPSDIAVEWESNGQPENNYKTTPPVLDSDGSFFLYSKLTVDKSRWQQGNVFSCSVMHEALHNHYTQKSLSLSPG

SEQ ID NO: 1781 - protein, 371 aa, synthetic construct
MKHLWFFLLLVAAPRWVLSEVQLVESGGGLVQAGGSLRLSCAASGNIFSRYIMGWFRQAPGKEREWVAGISNGGTTKYADSVKGRFTISADNAKNTVYLQMNSLKPEDTAVYYCAQGWKIVPTNWGQGTQVTVSSGGGGSEPKSSDKTHTCPPCPAPELLGGPSVFLFPPKPKDTLMISRTPEVTCVVVDVSHEDPEVKFNWYVDGVEVHNAKTKPREEQYNSTYRVVSVLTVLHQDWLNGKEYKCKVSNKALPAPIEKTISKAKGQPREPQVYTLPPSREEMTKNQVSLTCLVKGFYPSDIAVEWESNGQPENNYKTTPPVLDSDGSFFLYSKLTVDKSRWQQGNVFSCSVMHEALHNHYTQKSLSLSPG

SEQ ID NO: 1782 - protein, 367 aa, synthetic construct
MKHLWFFLLLVAAPRWVLSEVQLVESGGGLVQAGGSLRLSCAASGRSFSNYVMGWFRQAPGKERERVATITSGGLTVYADSVKGRFTISADNAKNTVYLQMNSLKPEDTAVYYCALYRVNWGQGTQVTVSSGGGGSEPKSSDKTHTCPPCPAPELLGGPSVFLFPPKPKDTLMISRTPEVTCVVVDVSHEDPEVKFNWYVDGVEVHNAKTKPREEQYNSTYRVVSVLTVLHQDWLNGKEYKCKVSNKALPAPIEKTISKAKGQPREPQVYTLPPSREEMTKNQVSLTCLVKGFYPSDIAVEWESNGQPENNYKTTPPVLDSDGSFFLYSKLTVDKSRWQQGNVFSCSVMHEALHNHYTQKSLSLSPG

SEQ ID NO: 1783 - protein, 373 aa, synthetic construct
MKHLWFFLLLVAAPRWVLSEVQLVESGGGLVQAGGSLRLSCAASGSIFSISDMGWFRQAPGKEREFVGAINWLSESTYYADSVKGRFTISADNAKNTVYLQMNSLKPEDTAVYYCAAQGGVLSGWDWGQGTQVTVSSGGGGSEPKSSDKTHTCPPCPAPELLGGPSVFLFPPKPKDTLMISRTPEVTCVVVDVSHEDPEVKFNWYVDGVEVHNAKTKPREEQYNSTYRVVSVLTVLHQDWLNGKEYKCKVSNKALPAPIEKTISKAKGQPREPQVYTLPPSREEMTKNQVSLTCLVKGFYPSDIAVEWESNGQPENNYKTTPPVLDSDGSFFLYSKLTVDKSRWQQGNVFSCSVMHEALHNHYTQKSLSLSPG

SEQ ID NO: 1784 - protein, 367 aa, synthetic construct
MKHLWFFLLLVAAPRWVLSEVQLVESGGGLVQAGGSLRLSCAASGRTFSNYFMGWFRQAPGKERESVATVTWRDNITYYADSVKGRFTISADNAKNTVYLQMNSLKPEDTAVYYCASAGRWGQGTQVTVSSGGGGSEPKSSDKTHTCPPCPAPELLGGPSVFLFPPKPKDTLMISRTPEVTCVVVDVSHEDPEVKFNWYVDGVEVHNAKTKPREEQYNSTYRVVSVLTVLHQDWLNGKEYKCKVSNKALPAPIEKTISKAKGQPREPQVYTLPPSREEMTKNQVSLTCLVKGFYPSDIAVEWESNGQPENNYKTTPPVLDSDGSFFLYSKLTVDKSRWQQGNVFSCSVMHEALHNHYTQKSLSLSPG

SEQ ID NO: 1785 - protein, 367 aa, synthetic construct
MKHLWFFLLLVAAPRWVLSEVQLVESGGGLVQAGGSLRLSCAASGLTFSNYVMGWFRQAPGKERESVAAINWDSARTYYADSVKGRFTISADNAKNTVYLQMNSLKPEDTAVYYCASAGRWGQGTQVTVSSGGGGSEPKSSDKTHTCPPCPAPELLGGPSVFLFPPKPKDTLMISRTPEVTCVVVDVSHEDPEVKFNWYVDGVEVHNAKTKPREEQYNSTYRVVSVLTVLHQDWLNGKEYKCKVSNKALPAPIEKTISKAKGQPREPQVYTLPPSREEMTKNQVSLTCLVKGFYPSDIAVEWESNGQPENNYKTTPPVLDSDGSFFLYSKLTVDKSRWQQGNVFSCSVMHEALHNHYTQKSLSLSPG

SEQ ID NO: 1786 - protein, 378 aa, synthetic construct
MKHLWFFLLLVAAPRWVLSEVQLVESGGGLVQAGGSLRLSCAASGFTFRSFGMGWFRQAPGKEREFVASTIWSRGDTYYADSVKGRFTISADNAKNTVYLQMNSLKPEDTAVYYCASSPYGPLYRSTHYYDWGQGTQVTVSSGGGGSEPKSSDKTHTCPPCPAPELLGGPSVFLFPPKPKDTLMISRTPEVTCVVVDVSHEDPEVKFNWYVDGVEVHNAKTKPREEQYNSTYRVVSVLTVLHQDWLNGKEYKCKVSNKALPAPIEKTISKAKGQPREPQVYTLPPSREEMTKNQVSLTCLVKGFYPSDIAVEWESNGQPENNYKTTPPVLDSDGSFFLYSKLTVDKSRWQQGNVFSCSVMHEALHNHYTQKSLSLSPG

SEQ ID NO: 1787 - protein, 373 aa, synthetic construct
MKHLWFFLLLVAAPRWVLSEVQLVESGGGLVQAGGSLRLSCAASGNTFSGGFMGWFRQAPGKEREWVASVLRGGYTWYADSVKGRFTISADNAKNTVYLQMNSLKPEDTAVYYCATGWQSTTKSQGWGQGTQVTVSSGGGGSEPKSSDKTHTCPPCPAPELLGGPSVFLFPPKPKDTLMISRTPEVTCVVVDVSHEDPEVKFNWYVDGVEVHNAKTKPREEQYNSTYRVVSVLTVLHQDWLNGKEYKCKVSNKALPAPIEKTISKAKGQPREPQVYTLPPSREEMTKNQVSLTCLVKGFYPSDIAVEWESNGQPENNYKTTPPVLDSDGSFFLYSKLTVDKSRWQQGNVFSCSVMHEALHNHYTQKSLSLSPG

SEQ ID NO: 1788 - protein, 369 aa, synthetic construct
MKHLWFFLLLVAAPRWVLSEVQLVESGGGLVQAGGSLRLSCAASGLTISTYPMGWFRQAPGKEREFVAAVNWSGRRELYADSVKGRFTISADNAKNTVYLQMNSLKPEDTAVYYCAAFREYHWGQGTQVTVSSGGGGSEPKSSDKTHTCPPCPAPELLGGPSVFLFPPKPKDTLMISRTPEVTCVVVDVSHEDPEVKFNWYVDGVEVHNAKTKPREEQYNSTYRVVSVLTVLHQDWLNGKEYKCKVSNKALPAPIEKTISKAKGQPREPQVYTLPPSREEMTKNQVSLTCLVKGFYPSDIAVEWESNGQPENNYKTTPPVLDSDGSFFLYSKLTVDKSRWQQGNVFSCSVMHEALHNHYTQKSLSLSPG

SEQ ID NO: 1789 - protein, 376 aa, synthetic construct
MKHLWFFLLLVAAPRWVLSEVQLVESGGGLVQAGGSLRLSCAASGPTFSIYDMGWFRQAPGKEREFVAAITWNSGRIGYADSVKGRFTISADNAKNTVYLQMNSLKPEDTAVYYCAAGVWSSLRHTAANWGQGTQVTVSSGGGGSEPKSSDKTHTCPPCPAPELLGGPSVFLFPPKPKDTLMISRTPEVTCVVVDVSHEDPEVKFNWYVDGVEVHNAKTKPREEQYNSTYRVVSVLTVLHQDWLNGKEYKCKVSNKALPAPIEKTISKAKGQPREPQVYTLPPSREEMTKNQVSLTCLVKGFYPSDIAVEWESNGQPENNYKTTPPVLDSDGSFFLYSKLTVDKSRWQQGNVFSCSVMHEALHNHYTQKSLSLSPG

SEQ ID NO: 1790 - protein, 374 aa, synthetic construct
MKHLWFFLLLVAAPRWVLSEVQLVESGGGLVQAGGSLRLSCAASGFAFGDSWMGWFRQAPGKEREWVSGISSGGGRTYYADSVKGRFTISADNAKNTVYLQMNSLKPEDTAVYYCAADVWYGSTWRNWGQGTQVTVSSGGGGSEPKSSDKTHTCPPCPAPELLGGPSVFLFPPKPKDTLMISRTPEVTCVVVDVSHEDPEVKFNWYVDGVEVHNAKTKPREEQYNSTYRVVSVLTVLHQDWLNGKEYKCKVSNKALPAPIEKTISKAKGQPREPQVYTLPPSREEMTKNQVSLTCLVKGFYPSDIAVEWESNGQPENNYKTTPPVLDSDGSFFLYSKLTVDKSRWQQGNVFSCSVMHEALHNHYTQKSLSLSPG

SEQ ID NO: 1791 - protein, 373 aa, synthetic construct
MKHLWFFLLLVAAPRWVLSEVQLVESGGGLVQPGGSLRLSCAASGFTFDRSWMGWFRQAPGKEREVVASITSGGSTYYADSVKGRFTISADNSKNTAYLQMNSLKPEDTAVYYCAADVWYGSTWRNWGQGTLVTVSSGGGGSEPKSSDKTHTCPPCPAPELLGGPSVFLFPPKPKDTLMISRTPEVTCVVVDVSHEDPEVKFNWYVDGVEVHNAKTKPREEQYNSTYRVVSVLTVLHQDWLNGKEYKCKVSNKALPAPIEKTISKAKGQPREPQVYTLPPSREEMTKNQVSLTCLVKGFYPSDIAVEWESNGQPENNYKTTPPVLDSDGSFFLYSKLTVDKSRWQQGNVFSCSVMHEALHNHYTQKSLSLSPG

SEQ ID NO: 1792 - protein, 371 aa, synthetic construct
MKHLWFFLLLVAAPRWVLSEVQLVESGGGLVQPGGSLRLSCAASGRTFGDYIMGWFRQAPGKERELVAEITRSGRTNYADSVKGRFTISADNSKNTAYLQMNSLKPEDTAVYYCAAVFSRGPLTWGQGTLVTVSSGGGGSEPKSSDKTHTCPPCPAPELLGGPSVFLFPPKPKDTLMISRTPEVTCVVVDVSHEDPEVKFNWYVDGVEVHNAKTKPREEQYNSTYRVVSVLTVLHQDWLNGKEYKCKVSNKALPAPIEKTISKAKGQPREPQVYTLPPSREEMTKNQVSLTCLVKGFYPSDIAVEWESNGQPENNYKTTPPVLDSDGSFFLYSKLTVDKSRWQQGNVFSCSVMHEALHNHYTQKSLSLSPG

SEQ ID NO: 1793 - protein, 374 aa, synthetic construct
MKHLWFFLLLVAAPRWVLSEVQLVESGGGLVQPGGSLRLSCAASGFTFSGNWMGWFRQAPGKEREFVASISSSGISTYYADSVKGRFTISADNSKNTAYLQMNSLKPEDTAVYYCAADVWYGSTWRNWGQGTLVTVSSGGGGSEPKSSDKTHTCPPCPAPELLGGPSVFLFPPKPKDTLMISRTPEVTCVVVDVSHEDPEVKFNWYVDGVEVHNAKTKPREEQYNSTYRVVSVLTVLHQDWLNGKEYKCKVSNKALPAPIEKTISKAKGQPREPQVYTLPPSREEMTKNQVSLTCLVKGFYPSDIAVEWESNGQPENNYKTTPPVLDSDGSFFLYSKLTVDKSRWQQGNVFSCSVMHEALHNHYTQKSLSLSPG

SEQ ID NO: 1794 - protein, 373 aa, synthetic construct
MKHLWFFLLLVAAPRWVLSEVQLVESGGGLVQPGGSLRLSCAASGFPVNRYWMGWFRQAPGKERELVATITSGGSTNYADSVKGRFTISADNSKNTAYLQMNSLKPEDTAVYYCAADVWYGSTWRNWGQGTLVTVSSGGGGSEPKSSDKTHTCPPCPAPELLGGPSVFLFPPKPKDTLMISRTPEVTCVVVDVSHEDPEVKFNWYVDGVEVHNAKTKPREEQYNSTYRVVSVLTVLHQDWLNGKEYKCKVSNKALPAPIEKTISKAKGQPREPQVYTLPPSREEMTKNQVSLTCLVKGFYPSDIAVEWESNGQPENNYKTTPPVLDSDGSFFLYSKLTVDKSRWQQGNVFSCSVMHEALHNHYTQKSLSLSPG

SEQ ID NO: 1795 - protein, 371 aa, synthetic construct
MKHLWFFLLLVAAPRWVLSEVQLVESGGGLVQPGGSLRLSCAASGRTFGDYIMGWFRQAPGKEREFVATISRGGGSTYVDSVKGRFTISADNSKNTAYLQMNSLKPEDTAVYYCAAVFSRGPLTWGQGTLVTVSSGGGGSEPKSSDKTHTCPPCPAPELLGGPSVFLFPPKPKDTLMISRTPEVTCVVVDVSHEDPEVKFNWYVDGVEVHNAKTKPREEQYNSTYRVVSVLTVLHQDWLNGKEYKCKVSNKALPAPIEKTISKAKGQPREPQVYTLPPSREEMTKNQVSLTCLVKGFYPSDIAVEWESNGQPENNYKTTPPVLDSDGSFFLYSKLTVDKSRWQQGNVFSCSVMHEALHNHYTQKSLSLSPG

SEQ ID NO: 1796 - protein, 373 aa, synthetic construct
MKHLWFFLLLVAAPRWVLSEVQLVESGGGLVQPGGSLRLSCAASGFTFSTSWMGWFRQAPGKERELVASITSGGSTYYADSVKGRFTISADNSKNTAYLQMNSLKPEDTAVYYCAADVWYGSTWRNWGQGTLVTVSSGGGGSEPKSSDKTHTCPPCPAPELLGGPSVFLFPPKPKDTLMISRTPEVTCVVVDVSHEDPEVKFNWYVDGVEVHNAKTKPREEQYNSTYRVVSVLTVLHQDWLNGKEYKCKVSNKALPAPIEKTISKAKGQPREPQVYTLPPSREEMTKNQVSLTCLVKGFYPSDIAVEWESNGQPENNYKTTPPVLDSDGSFFLYSKLTVDKSRWQQGNVFSCSVMHEALHNHYTQKSLSLSPG

SEQ ID NO: 1797 - protein, 384 aa, synthetic construct
MKHLWFFLLLVAAPRWVLSEVQLVESGGGLVQPGGSLRLSCAASGSTFSINRMGWFRQAPGKEREWVATIVHSGGHSGGTSYYADSVKGRFTISADNSKNTAYLQMNSLKPEDTAVYYCAARPYTRPGSMWVSSLYDWGQGTLVTVSSGGGGSEPKSSDKTHTCPPCPAPELLGGPSVFLFPPKPKDTLMISRTPEVTCVVVDVSHEDPEVKFNWYVDGVEVHNAKTKPREEQYNSTYRVVSVLTVLHQDWLNGKEYKCKVSNKALPAPIEKTISKAKGQPREPQVYTLPPSREEMTKNQVSLTCLVKGFYPSDIAVEWESNGQPENNYKTTPPVLDSDGSFFLYSKLTVDKSRWQQGNVFSCSVMHEALHNHYTQKSLSLSPG

SEQ ID NO: 1798 - protein, 373 aa, synthetic construct
MKHLWFFLLLVAAPRWVLSEVQLVESGGGLVQPGGSLRLSCAASGFTFSTSWMGWFRQAPGKERELVAARNSGGNTNYADSVKGRFTISADNSKNTAYLQMNSLKPEDTAVYYCAADVWYGSTWRNWGQGTLVTVSSGGGGSEPKSSDKTHTCPPCPAPELLGGPSVFLFPPKPKDTLMISRTPEVTCVVVDVSHEDPEVKFNWYVDGVEVHNAKTKPREEQYNSTYRVVSVLTVLHQDWLNGKEYKCKVSNKALPAPIEKTISKAKGQPREPQVYTLPPSREEMTKNQVSLTCLVKGFYPSDIAVEWESNGQPENNYKTTPPVLDSDGSFFLYSKLTVDKSRWQQGNVFSCSVMHEALHNHYTQKSLSLSPG

SEQ ID NO: 1799 - protein, 371 aa, synthetic construct
MKHLWFFLLLVAAPRWVLSEVQLVESGGGLVQPGGSLRLSCAASGGTLSGNAMGWFRQAPGKEREWVASIYWSSGNTYYADSVKGRFTISADNSKNTAYLQMNSLKPEDTAVYYCANSNKPKFDWGQGTLVTVSSGGGGSEPKSSDKTHTCPPCPAPELLGGPSVFLFPPKPKDTLMISRTPEVTCVVVDVSHEDPEVKFNWYVDGVEVHNAKTKPREEQYNSTYRVVSVLTVLHQDWLNGKEYKCKVSNKALPAPIEKTISKAKGQPREPQVYTLPPSREEMTKNQVSLTCLVKGFYPSDIAVEWESNGQPENNYKTTPPVLDSDGSFFLYSKLTVDKSRWQQGNVFSCSVMHEALHNHYTQKSLSLSPG

SEQ ID NO: 1800 - protein, 378 aa, synthetic construct
MKHLWFFLLLVAAPRWVLSEVQLVESGGGLVQPGGSLRLSCAASGHTFSSYGMGWFRQAPGKERELVAAISWSGISTIYADSVKGRFTISADNSKNTAYLQMNSLKPEDTAVYYCASSPYGPLYRSTHYYDWGQGTLVTVSSGGGGSEPKSSDKTHTCPPCPAPELLGGPSVFLFPPKPKDTLMISRTPEVTCVVVDVSHEDPEVKFNWYVDGVEVHNAKTKPREEQYNSTYRVVSVLTVLHQDWLNGKEYKCKVSNKALPAPIEKTISKAKGQPREPQVYTLPPSREEMTKNQVSLTCLVKGFYPSDIAVEWESNGQPENNYKTTPPVLDSDGSFFLYSKLTVDKSRWQQGNVFSCSVMHEALHNHYTQKSLSLSPG

SEQ ID NO: 1801 - protein, 373 aa, synthetic construct
MKHLWFFLLLVAAPRWVLSEVQLVESGGGLVQPGGSLRLSCAASGFTFSTSWMGWFRQAPGKEREFVASISTSGNTFYADSVKGRFTISADNSKNTAYLQMNSLKPEDTAVYYCAADVWYGSTWRNWGQGTLVTVSSGGGGSEPKSSDKTHTCPPCPAPELLGGPSVFLFPPKPKDTLMISRTPEVTCVVVDVSHEDPEVKFNWYVDGVEVHNAKTKPREEQYNSTYRVVSVLTVLHQDWLNGKEYKCKVSNKALPAPIEKTISKAKGQPREPQVYTLPPSREEMTKNQVSLTCLVKGFYPSDIAVEWESNGQPENNYKTTPPVLDSDGSFFLYSKLTVDKSRWQQGNVFSCSVMHEALHNHYTQKSLSLSPG

SEQ ID NO: 1802 - protein, 373 aa, synthetic construct
MKHLWFFLLLVAAPRWVLSEVQLVESGGGLVQPGGSLRLSCAASGFTFSRYWMGWFRQAPGKEREAVASITSGGSTYYADSVKGRFTISADNSKNTAYLQMNSLKPEDTAVYYCAADVWYGSTWRNWGQGTLVTVSSGGGGSEPKSSDKTHTCPPCPAPELLGGPSVFLFPPKPKDTLMISRTPEVTCVVVDVSHEDPEVKFNWYVDGVEVHNAKTKPREEQYNSTYRVVSVLTVLHQDWLNGKEYKCKVSNKALPAPIEKTISKAKGQPREPQVYTLPPSREEMTKNQVSLTCLVKGFYPSDIAVEWESNGQPENNYKTTPPVLDSDGSFFLYSKLTVDKSRWQQGNVFSCSVMHEALHNHYTQKSLSLSPG

SEQ ID NO: 1803 - protein, 373 aa, synthetic construct
MKHLWFFLLLVAAPRWVLSEVQLVESGGGLVQPGGSLRLSCAASGFTFDRSWMGWFRQAPGKEREWVASITSGGTTNYADSVKGRFTISADNSKNTAYLQMNSLKPEDTAVYYCAADVWYGSTWRNWGQGTLVTVSSGGGGSEPKSSDKTHTCPPCPAPELLGGPSVFLFPPKPKDTLMISRTPEVTCVVVDVSHEDPEVKFNWYVDGVEVHNAKTKPREEQYNSTYRVVSVLTVLHQDWLNGKEYKCKVSNKALPAPIEKTISKAKGQPREPQVYTLPPSREEMTKNQVSLTCLVKGFYPSDIAVEWESNGQPENNYKTTPPVLDSDGSFFLYSKLTVDKSRWQQGNVFSCSVMHEALHNHYTQKSLSLSPG

SEQ ID NO: 1804 - protein, 377 aa, synthetic construct
MKHLWFFLLLVAAPRWVLSEVQLVESGGGLVQPGGSLRLSCAASGYTFRAYVMGWFRQAPGKERELVAVINYRGSSLKYADSVKGRFTISADNSKNTAYLQMNSLKPEDTAVYYCAASEWGGSDYDHDYDWGQGTLVTVSSGGGGSEPKSSDKTHTCPPCPAPELLGGPSVFLFPPKPKDTLMISRTPEVTCVVVDVSHEDPEVKFNWYVDGVEVHNAKTKPREEQYNSTYRVVSVLTVLHQDWLNGKEYKCKVSNKALPAPIEKTISKAKGQPREPQVYTLPPSREEMTKNQVSLTCLVKGFYPSDIAVEWESNGQPENNYKTTPPVLDSDGSFFLYSKLTVDKSRWQQGNVFSCSVMHEALHNHYTQKSLSLSPG

SEQ ID NO: 1805 - protein, 378 aa, synthetic construct
MKHLWFFLLLVAAPRWVLSEVQLVESGGGLVQPGGSLRLSCAASGFTFSTYGMGWFRQAPGKEREFVAAISWSGVSKHYADSVKGRFTISADNSKNTAYLQMNSLKPEDTAVYYCASSPYGPLYRSTHYYDWGQGTLVTVSSGGGGSEPKSSDKTHTCPPCPAPELLGGPSVFLFPPKPKDTLMISRTPEVTCVVVDVSHEDPEVKFNWYVDGVEVHNAKTKPREEQYNSTYRVVSVLTVLHQDWLNGKEYKCKVSNKALPAPIEKTISKAKGQPREPQVYTLPPSREEMTKNQVSLTCLVKGFYPSDIAVEWESNGQPENNYKTTPPVLDSDGSFFLYSKLTVDKSRWQQGNVFSCSVMHEALHNHYTQKSLSLSPG

SEQ ID NO: 1806 - protein, 373 aa, synthetic construct
MKHLWFFLLLVAAPRWVLSEVQLVESGGGLVQPGGSLRLSCAASGFTFSTSWMGWFRQAPGKERELVVSVTSGGYTNYADSVKGRFTISADNSKNTAYLQMNSLKPEDTAVYYCAADVWYGSTWRNWGQGTLVTVSSGGGGSEPKSSDKTHTCPPCPAPELLGGPSVFLFPPKPKDTLMISRTPEVTCVVVDVSHEDPEVKFNWYVDGVEVHNAKTKPREEQYNSTYRVVSVLTVLHQDWLNGKEYKCKVSNKALPAPIEKTISKAKGQPREPQVYTLPPSREEMTKNQVSLTCLVKGFYPSDIAVEWESNGQPENNYKTTPPVLDSDGSFFLYSKLTVDKSRWQQGNVFSCSVMHEALHNHYTQKSLSLSPG

SEQ ID NO: 1807 - protein, 373 aa, synthetic construct
MKHLWFFLLLVAAPRWVLSEVQLVESGGGLVQPGGSLRLSCAASGFTMSSSWMGWFRQAPGKEREWVASINSGGTRNYADSVKGRFTISADNSKNTAYLQMNSLKPEDTAVYYCAADVWYGSTWRNWGQGTLVTVSSGGGGSEPKSSDKTHTCPPCPAPELLGGPSVFLFPPKPKDTLMISRTPEVTCVVVDVSHEDPEVKFNWYVDGVEVHNAKTKPREEQYNSTYRVVSVLTVLHQDWLNGKEYKCKVSNKALPAPIEKTISKAKGQPREPQVYTLPPSREEMTKNQVSLTCLVKGFYPSDIAVEWESNGQPENNYKTTPPVLDSDGSFFLYSKLTVDKSRWQQGNVFSCSVMHEALHNHYTQKSLSLSPG

SEQ ID NO: 1808 - protein, 373 aa, synthetic construct
MKHLWFFLLLVAAPRWVLSEVQLVESGGGLVQPGGSLRLSCAASGFTFSGNWMGWFRQAPGKEREFVASISSGSAINYADSVKGRFTISADNSKNTAYLQMNSLKPEDTAVYYCAADVWYGSTWRNWGQGTLVTVSSGGGGSEPKSSDKTHTCPPCPAPELLGGPSVFLFPPKPKDTLMISRTPEVTCVVVDVSHEDPEVKFNWYVDGVEVHNAKTKPREEQYNSTYRVVSVLTVLHQDWLNGKEYKCKVSNKALPAPIEKTISKAKGQPREPQVYTLPPSREEMTKNQVSLTCLVKGFYPSDIAVEWESNGQPENNYKTTPPVLDSDGSFFLYSKLTVDKSRWQQGNVFSCSVMHEALHNHYTQKSLSLSPG

SEQ ID NO: 1809 - protein, 377 aa, synthetic construct
MKHLWFFLLLVAAPRWVLSEVQLVESGGGLVQPGGSLRLSCAASGRTFGNYAMGWFRQAPGKEREFVADIRSSAGRTYYADSVKGRFTISADNSKNTAYLQMNSLKPEDTAVYYCAASEWGGSDYDHDYDWGQGTLVTVSSGGGGSEPKSSDKTHTCPPCPAPELLGGPSVFLFPPKPKDTLMISRTPEVTCVVVDVSHEDPEVKFNWYVDGVEVHNAKTKPREEQYNSTYRVVSVLTVLHQDWLNGKEYKCKVSNKALPAPIEKTISKAKGQPREPQVYTLPPSREEMTKNQVSLTCLVKGFYPSDIAVEWESNGQPENNYKTTPPVLDSDGSFFLYSKLTVDKSRWQQGNVFSCSVMHEALHNHYTQKSLSLSPG

SEQ ID NO: 1810 - protein, 373 aa, synthetic construct
MKHLWFFLLLVAAPRWVLSEVQLVESGGGLVQPGGSLRLSCAASGFTFSGNWMGWFRQAPGKEREFVAGILSDGRELYADSVKGRFTISADNSKNTAYLQMNSLKPEDTAVYYCAADVWYGSTWRNWGQGTLVTVSSGGGGSEPKSSDKTHTCPPCPAPELLGGPSVFLFPPKPKDTLMISRTPEVTCVVVDVSHEDPEVKFNWYVDGVEVHNAKTKPREEQYNSTYRVVSVLTVLHQDWLNGKEYKCKVSNKALPAPIEKTISKAKGQPREPQVYTLPPSREEMTKNQVSLTCLVKGFYPSDIAVEWESNGQPENNYKTTPPVLDSDGSFFLYSKLTVDKSRWQQGNVFSCSVMHEALHNHYTQKSLSLSPG

SEQ ID NO: 1811 - protein, 374 aa, synthetic construct
MKHLWFFLLLVAAPRWVLSEVQLVESGGGLVQPGGSLRLSCAASGFTLSGNWMGWFRQAPGKEREFVASISSSGISTYYADSVKGRFIISADNSKNTAYLQMNSLKPEDTAVYYCAADVWYGSTWRNWGQGTLVTVSSGGGGSEPKSSDKTHTCPPCPAPELLGGPSVFLFPPKPKDTLMISRTPEVTCVVVDVSHEDPEVKFNWYVDGVEVHNAKTKPREEQYNSTYRVVSVLTVLHQDWLNGKEYKCKVSNKALPAPIEKTISKAKGQPREPQVYTLPPSREEMTKNQVSLTCLVKGFYPSDIAVEWESNGQPENNYKTTPPVLDSDGSFFLYSKLTVDKSRWQQGNVFSCSVMHEALHNHYTQKSLSLSPG

SEQ ID NO: 1812 - protein, 376 aa, synthetic construct
MKHLWFFLLLVAAPRWVLSEVQLVESGGGLVQPGGSLRLSCAASGRTFSTHAMGWFRQAPGKEREFVAAITPINWGGRGTHYADSVKGRFTISADNSKNTAYLQMNSLKPEDNAVYYCAAKRLRSGRWTWGQGTLVTVSSGGGGSEPKSSDKTHTCPPCPAPELLGGPSVFLFPPKPKDTLMISRTPEVTCVVVDVSHEDPEVKFNWYVDGVEVHNAKTKPREEQYNSTYRVVSVLTVLHQDWLNGKEYKCKVSNKALPAPIEKTISKAKGQPREPQVYTLPPSREEMTKNQVSLTCLVKGFYPSDIAVEWESNGQPENNYKTTPPVLDSDGSFFLYSKLTVDKSRWQQGNVFSCSVMHEALHNHYTQKSLSLSPG

SEQ ID NO: 1813 - protein, 371 aa, synthetic construct
MKHLWFFLLLVAAPRWVLSEVQLVESGGGLVQPGGSLRLSCAASGFTFSNSGMGWFRQAPGKEREWVASIYWSSGNTYYADSVKGRFTISADNSKNTAYLQMNSLKPEDTAVYYCANSNKPKFDWGQGTLVTVSSGGGGSEPKSSDKTHTCPPCPAPELLGGPSVFLFPPKPKDTLMISRTPEVTCVVVDVSHEDPEVKFNWYVDGVEVHNAKTKPREEQYNSTYRVVSVLTVLHQDWLNGKEYKCKVSNKALPAPIEKTISKAKGQPREPQVYTLPPSREEMTKNQVSLTCLVKGFYPSDIAVEWESNGQPENNYKTTPPVLDSDGSFFLYSKLTVDKSRWQQGNVFSCSVMHEALHNHYTQKSLSLSPG

SEQ ID NO: 1814 - protein, 375 aa, synthetic construct
MKHLWFFLLLVAAPRWVLSEVQLVESGGGLVQPGGSLRLSCAASGRTFSMGWFRQAPGKEREFVATVRWGTSSTYYADSVKGRFTISADNSKNTAYLQMNSLKPEDTAVYYCAAETFGSGSSLMSEYDWGQGTLVTVSSGGGGSEPKSSDKTHTCPPCPAPELLGGPSVFLFPPKPKDTLMISRTPEVTCVVVDVSHEDPEVKFNWYVDGVEVHNAKTKPREEQYNSTYRVVSVLTVLHQDWLNGKEYKCKVSNKALPAPIEKTISKAKGQPREPQVYTLPPSREEMTKNQVSLTCLVKGFYPSDIAVEWESNGQPENNYKTTPPVLDSDGSFFLYSKLTVDKSRWQQGNVFSCSVMHEALHNHYTQKSLSLSPG

SEQ ID NO: 1815 - protein, 371 aa, synthetic construct
MKHLWFFLLLVAAPRWVLSEVQLVESGGGLVQPGGSLRLSCAASGNIFSRYIMGWFRQAPGKEREWVAGISNGGTTKYADSVKGRFTISADNSKNTAYLQMNSLKPEDTAVYYCAQGWKIVPTNWGQGTLVTVSSGGGGSEPKSSDKTHTCPPCPAPELLGGPSVFLFPPKPKDTLMISRTPEVTCVVVDVSHEDPEVKFNWYVDGVEVHNAKTKPREEQYNSTYRVVSVLTVLHQDWLNGKEYKCKVSNKALPAPIEKTISKAKGQPREPQVYTLPPSREEMTKNQVSLTCLVKGFYPSDIAVEWESNGQPENNYKTTPPVLDSDGSFFLYSKLTVDKSRWQQGNVFSCSVMHEALHNHYTQKSLSLSPG

SEQ ID NO: 1816 - protein, 373 aa, synthetic construct
MKHLWFFLLLVAAPRWVLSEVQLVESGGGLVQPGGSLRLSCAASGFTFDRSWMGWFRQAPGKERELVAAITSGGSTYYADSVKGRFTISADNSKNTAYLQMNSLKPEDTAVYYCAADVWYGSTWRNWGQGTLVTVSSGGGGSEPKSSDKTHTCPPCPAPELLGGPSVFLFPPKPKDTLMISRTPEVTCVVVDVSHEDPEVKFNWYVDGVEVHNAKTKPREEQYNSTYRVVSVLTVLHQDWLNGKEYKCKVSNKALPAPIEKTISKAKGQPREPQVYTLPPSREEMTKNQVSLTCLVKGFYPSDIAVEWESNGQPENNYKTTPPVLDSDGSFFLYSKLTVDKSRWQQGNVFSCSVMHEALHNHYTQKSLSLSPG

SEQ ID NO: 1817 - protein, 378 aa, synthetic construct
MKHLWFFLLLVAAPRWVLSEVQLVESGGGLVQPGGSLRLSCAASGFTFGHYAMGWFRQAPGKEREFVAAISWSGVSTYYADSVKGRFTISADNSKNTAYLQMNSLKPEDTAVYYCASSPYGPLYRSTHYYDWGQGTLVTVSSGGGGSEPKSSDKTHTCPPCPAPELLGGPSVFLFPPKPKDTLMISRTPEVTCVVVDVSHEDPEVKFNWYVDGVEVHNAKTKPREEQYNSTYRVVSVLTVLHQDWLNGKEYKCKVSNKALPAPIEKTISKAKGQPREPQVYTLPPSREEMTKNQVSLTCLVKGFYPSDIAVEWESNGQPENNYKTTPPVLDSDGSFFLYSKLTVDKSRWQQGNVFSCSVMHEALHNHYTQKSLSLSPG

SEQ ID NO: 1818 - protein, 373 aa, synthetic construct
MKHLWFFLLLVAAPRWVLSEVQLVESGGGLVQPGGSLRLSCAASGRTFSSYHMGWFRQAPGKERELVALISRVGVTSYADSVKGRFTISADNSKNTAYLQMNSLKPEDTAVYYCAAVRTYGSATYDWGQGTLVTVSSGGGGSEPKSSDKTHTCPPCPAPELLGGPSVFLFPPKPKDTLMISRTPEVTCVVVDVSHEDPEVKFNWYVDGVEVHNAKTKPREEQYNSTYRVVSVLTVLHQDWLNGKEYKCKVSNKALPAPIEKTISKAKGQPREPQVYTLPPSREEMTKNQVSLTCLVKGFYPSDIAVEWESNGQPENNYKTTPPVLDSDGSFFLYSKLTVDKSRWQQGNVFSCSVMHEALHNHYTQKSLSLSPG

SEQ ID NO: 1819 - protein, 367 aa, synthetic construct
MKHLWFFLLLVAAPRWVLSEVQLVESGGGLVQPGGSLRLSCAASGRSRMGWFRQAPGKEREFVATISWSGSAVYADSVKGRFTISADNSKNTAYLQMNSLKPEDTAVYYCAAGGRYSARVWGQGTLVTVSSGGGGSEPKSSDKTHTCPPCPAPELLGGPSVFLFPPKPKDTLMISRTPEVTCVVVDVSHEDPEVKFNWYVDGVEVHNAKTKPREEQYNSTYRVVSVLTVLHQDWLNGKEYKCKVSNKALPAPIEKTISKAKGQPREPQVYTLPPSREEMTKNQVSLTCLVKGFYPSDIAVEWESNGQPENNYKTTPPVLDSDGSFFLYSKLTVDKSRWQQGNVFSCSVMHEALHNHYTQKSLSLSPG

SEQ ID NO: 1820 - protein, 373 aa, synthetic construct
MKHLWFFLLLVAAPRWVLSEVQLVESGGGLVQPGGSLRLSCAASGRTYNMGWFRQAPGKEREWVATIYSRSGGSTTYYADSVKGRFTISADNSKNTAYLQMNSLKPEDTAVYYCATYGYDSGRYYSWGQGTLVTVSSGGGGSEPKSSDKTHTCPPCPAPELLGGPSVFLFPPKPKDTLMISRTPEVTCVVVDVSHEDPEVKFNWYVDGVEVHNAKTKPREEQYNSTYRVVSVLTVLHQDWLNGKEYKCKVSNKALPAPIEKTISKAKGQPREPQVYTLPPSREEMTKNQVSLTCLVKGFYPSDIAVEWESNGQPENNYKTTPPVLDSDGSFFLYSKLTVDKSRWQQGNVFSCSVMHEALHNHYTQKSLSLSPG

SEQ ID NO: 1821 - protein, 373 aa, synthetic construct
MKHLWFFLLLVAAPRWVLSEVQLVESGGGLVQPGGSLRLSCAASGFTLSGNWMGWFRQAPGKEREFVASISSGGGTNYADSVKGRFTISADNSKNTAYLQMNSLKPEDTAVYYCAADVWYGSTWRNWGQGTLVTVSSGGGGSEPKSSDKTHTCPPCPAPELLGGPSVFLFPPKPKDTLMISRTPEVTCVVVDVSHEDPEVKFNWYVDGVEVHNAKTKPREEQYNSTYRVVSVLTVLHQDWLNGKEYKCKVSNKALPAPIEKTISKAKGQPREPQVYTLPPSREEMTKNQVSLTCLVKGFYPSDIAVEWESNGQPENNYKTTPPVLDSDGSFFLYSKLTVDKSRWQQGNVFSCSVMHEALHNHYTQKSLSLSPG

SEQ ID NO: 1822 - protein, 373 aa, synthetic construct
MKHLWFFLLLVAAPRWVLSEVQLVESGGGLVQPGGSLRLSCAASGFTFSTSWMGWFRQAPGKERELVAAMTSGGGTNYADSVKGRFTISADNSKNTAYLQMNSLKPEDTAVYYCAADVWYGSTWRNWGQGTLVTVSSGGGGSEPKSSDKTHTCPPCPAPELLGGPSVFLFPPKPKDTLMISRTPEVTCVVVDVSHEDPEVKFNWYVDGVEVHNAKTKPREEQYNSTYRVVSVLTVLHQDWLNGKEYKCKVSNKALPAPIEKTISKAKGQPREPQVYTLPPSREEMTKNQVSLTCLVKGFYPSDIAVEWESNGQPENNYKTTPPVLDSDGSFFLYSKLTVDKSRWQQGNVFSCSVMHEALHNHYTQKSLSLSPG

SEQ ID NO: 1823 - protein, 373 aa, synthetic construct
MKHLWFFLLLVAAPRWVLSEVQLVESGGGLVQPGGSLRLSCAASGFTFSTSWMGWFRQAPGKERELVASITSGGSTNYADSVKGRFTISADNSKNTAYLQMNSLKPEDTAVYYCAADVWYGSTWRNWGQGTLVTVSSGGGGSEPKSSDKTHTCPPCPAPELLGGPSVFLFPPKPKDTLMISRTPEVTCVVVDVSHEDPEVKFNWYVDGVEVHNAKTKPREEQYNSTYRVVSVLTVLHQDWLNGKEYKCKVSNKALPAPIEKTISKAKGQPREPQVYTLPPSREEMTKNQVSLTCLVKGFYPSDIAVEWESNGQPENNYKTTPPVLDSDGSFFLYSKLTVDKSRWQQGNVFSCSVMHEALHNHYTQKSLSLSPG

SEQ ID NO: 1824 - protein, 377 aa, synthetic construct
MKHLWFFLLLVAAPRWVLSEVQLVESGGGLVQPGGSLRLSCAASGRSRYGMGWFRQAPGKEREFVSAISWSGISTYYADSVKGRFTISADNSKNTAYLQMNSLKPEDTAVYYCAATQWGSSGWKQARWYDWGQGTLVTVSSGGGGSEPKSSDKTHTCPPCPAPELLGGPSVFLFPPKPKDTLMISRTPEVTCVVVDVSHEDPEVKFNWYVDGVEVHNAKTKPREEQYNSTYRVVSVLTVLHQDWLNGKEYKCKVSNKALPAPIEKTISKAKGQPREPQVYTLPPSREEMTKNQVSLTCLVKGFYPSDIAVEWESNGQPENNYKTTPPVLDSDGSFFLYSKLTVDKSRWQQGNVFSCSVMHEALHNHYTQKSLSLSPG

SEQ ID NO: 1825 - protein, 373 aa, synthetic construct
MKHLWFFLLLVAAPRWVLSEVQLVESGGGLVQPGGSLRLSCAASGFTFSTSWMGWFRQAPGKERELVASITSGGTTNYADSVKGRFTISADNSKNTAYLQMNSLKPEDTAVYYCAADVWYGSTWRNWGQGTLVTVSSGGGGSEPKSSDKTHTCPPCPAPELLGGPSVFLFPPKPKDTLMISRTPEVTCVVVDVSHEDPEVKFNWYVDGVEVHNAKTKPREEQYNSTYRVVSVLTVLHQDWLNGKEYKCKVSNKALPAPIEKTISKAKGQPREPQVYTLPPSREEMTKNQVSLTCLVKGFYPSDIAVEWESNGQPENNYKTTPPVLDSDGSFFLYSKLTVDKSRWQQGNVFSCSVMHEALHNHYTQKSLSLSPG

SEQ ID NO: 1826 - protein, 373 aa, synthetic construct
MKHLWFFLLLVAAPRWVLSEVQLVESGGGLVQPGGSLRLSCAASGFTFDRSWMGWFRQAPGKERELVASVTSGGTTNYADSVKGRFTISADNSKNTAYLQMNSLKPEDTAVYYCAADVWYGSTWRNWGQGTLVTVSSGGGGSEPKSSDKTHTCPPCPAPELLGGPSVFLFPPKPKDTLMISRTPEVTCVVVDVSHEDPEVKFNWYVDGVEVHNAKTKPREEQYNSTYRVVSVLTVLHQDWLNGKEYKCKVSNKALPAPIEKTISKAKGQPREPQVYTLPPSREEMTKNQVSLTCLVKGFYPSDIAVEWESNGQPENNYKTTPPVLDSDGSFFLYSKLTVDKSRWQQGNVFSCSVMHEALHNHYTQKSLSLSPG

SEQ ID NO: 1827 - protein, 376 aa, synthetic construct
MKHLWFFLLLVAAPRWVLSEVQLVESGGGLVQPGGSLRLSCAASGSIFSINSMGWFRQAPGKEREFVAALSWIIGSTYYADSVKGRFTISADNSKNTAYLQMNSLKPEDTAVYYCAVNGRWRSWSSQRDWGQGTLVTVSSGGGGSEPKSSDKTHTCPPCPAPELLGGPSVFLFPPKPKDTLMISRTPEVTCVVVDVSHEDPEVKFNWYVDGVEVHNAKTKPREEQYNSTYRVVSVLTVLHQDWLNGKEYKCKVSNKALPAPIEKTISKAKGQPREPQVYTLPPSREEMTKNQVSLTCLVKGFYPSDIAVEWESNGQPENNYKTTPPVLDSDGSFFLYSKLTVDKSRWQQGNVFSCSVMHEALHNHYTQKSLSLSPG

SEQ ID NO: 1828 - protein, 373 aa, synthetic construct
MKHLWFFLLLVAAPRWVLSEVQLVESGGGLVQPGGSLRLSCAASGFTFDRSWMGWFRQAPGKERELVASITSGGSTSYADSVKGRFTISADNSKNTAYLQMNSLKPEDTAVYYCAADVWYGSTWRNWGQGTLVTVSSGGGGSEPKSSDKTHTCPPCPAPELLGGPSVFLFPPKPKDTLMISRTPEVTCVVVDVSHEDPEVKFNWYVDGVEVHNAKTKPREEQYNSTYRVVSVLTVLHQDWLNGKEYKCKVSNKALPAPIEKTISKAKGQPREPQVYTLPPSREEMTKNQVSLTCLVKGFYPSDIAVEWESNGQPENNYKTTPPVLDSDGSFFLYSKLTVDKSRWQQGNVFSCSVMHEALHNHYTQKSLSLSPG

SEQ ID NO: 1829 - protein, 373 aa, synthetic construct
MKHLWFFLLLVAAPRWVLSEVQLVESGGGLVQPGGSLRLSCAASGFTFSTSWMGWFRQAPGKERELVAGVNSNGYINYADSVKGRFTISADNSKNTAYLQMNSLKPEDTAVYYCAADVWYGSTWRNWGQGTLVTVSSGGGGSEPKSSDKTHTCPPCPAPELLGGPSVFLFPPKPKDTLMISRTPEVTCVVVDVSHEDPEVKFNWYVDGVEVHNAKTKPREEQYNSTYRVVSVLTVLHQDWLNGKEYKCKVSNKALPAPIEKTISKAKGQPREPQVYTLPPSREEMTKNQVSLTCLVKGFYPSDIAVEWESNGQPENNYKTTPPVLDSDGSFFLYSKLTVDKSRWQQGNVFSCSVMHEALHNHYTQKSLSLSPG

SEQ ID NO: 1830 - protein, 371 aa, synthetic construct
MKHLWFFLLLVAAPRWVLSEVQLVESGGGLVQPGGSLRLSCAASGSTLRDYVMGWFRQAPGKERELVSSISRSGTTMFADSVKGRFTIIADNSKNTAYLLMNSLKPQDTAVYYCAAVFSRGLLTCGQGTLVTVSSGGGGSEPKSSDKTHTCPPCPAPELLGGPSVFLFPPKPKDTLMISRTPEVTCVVVDVSHEDPEVKFNWYVDGVEVHNAKTKPREEQYNSTYRVVSVLTVLHQDWLNGKEYKCKVSNKALPAPIEKTISKAKGQPREPQVYTLPPSREEMTKNQVSLTCLVKGFYPSDIAVEWESNGQPENNYKTTPPVLDSDGSFFLYSKLTVDKSRWQQGNVFSCSVMHEALHNHYTQKSLSLSPG

SEQ ID NO: 1831 - protein, 376 aa, synthetic construct
MKHLWFFLLLVAAPRWVLSEVQLVESGGGLVQPGGSLRLSCAASGGTLSSYIMGWFRQAPGKEREFVAAISGWSGGTTNYADSVKGRFTISADNSKNTAYLQMNSLKPEDTAVYYCAAARFAPGSRGYDWGQGTLVTVSSGGGGSEPKSSDKTHTCPPCPAPELLGGPSVFLFPPKPKDTLMISRTPEVTCVVVDVSHEDPEVKFNWYVDGVEVHNAKTKPREEQYNSTYRVVSVLTVLHQDWLNGKEYKCKVSNKALPAPIEKTISKAKGQPREPQVYTLPPSREEMTKNQVSLTCLVKGFYPSDIAVEWESNGQPENNYKTTPPVLDSDGSFFLYSKLTVDKSRWQQGNVFSCSVMHEALHNHYTQKSLSLSPG

SEQ ID NO: 1832 - protein, 373 aa, synthetic construct
MKHLWFFLLLVAAPRWVLSEVQLVESGGGLVQPGGSLRLSCAASGFTFSTHWMGWFRQAPGKEREFVASIGSSGTTRYADSVKGRFTISADNSKNTAYLQMNSLKPEDTAVYYCAADVWYGSTWRNWGQGTLVTVSSGGGGSEPKSSDKTHTCPPCPAPELLGGPSVFLFPPKPKDTLMISRTPEVTCVVVDVSHEDPEVKFNWYVDGVEVHNAKTKPREEQYNSTYRVVSVLTVLHQDWLNGKEYKCKVSNKALPAPIEKTISKAKGQPREPQVYTLPPSREEMTKNQVSLTCLVKGFYPSDIAVEWESNGQPENNYKTTPPVLDSDGSFFLYSKLTVDKSRWQQGNVFSCSVMHEALHNHYTQKSLSLSPG

SEQ ID NO: 1833 - protein, 372 aa, synthetic construct
MKHLWFFLLLVAAPRWVLSEVQLVESGGGLVQPGGSLRLSCAASGGTFSAFPMGWFRQAPGKERELVAAISSGGTTYYADSVKGRFTISADNSKNTAYLQMNSLKPEDTAVYYCAAQGGVLSAWDWGQGTLLTVSSGGGGSEPKSSDKTHTCPPCPAPELLGGPSVFLFPPKPKDTLMISRTPEVTCVVVDVSHEDPEVKFNWYVDGVEVHNAKTKPREEQYNSTYRVVSVLTVLHQDWLNGKEYKCKVSNKALPAPIEKTISKAKGQPREPQVYTLPPSREEMTKNQVSLTCLVKGFYPSDIAVEWESNGQPENNYKTTPPVLDSDGSFFLYSKLTVDKSRWQQGNVFSCSVMHEALHNHYTQKSLSLSPG

SEQ ID NO: 1834 - protein, 373 aa, synthetic construct
MKHLWFFLLLVAAPRWVLSEVQLVESGGGLVQPGGSLRLSCAASGFTFSGNWMGWFRQAPGKEREWVASISSGGTTNYADSVKGRFTISADNSKNTAYLQMNSLKPEDTAVYYCAADVWYGSTWRNWGQGTLVTVSSGGGGSEPKSSDKTHTCPPCPAPELLGGPSVFLFPPKPKDTLMISRTPEVTCVVVDVSHEDPEVKFNWYVDGVEVHNAKTKPREEQYNSTYRVVSVLTVLHQDWLNGKEYKCKVSNKALPAPIEKTISKAKGQPREPQVYTLPPSREEMTKNQVSLTCLVKGFYPSDIAVEWESNGQPENNYKTTPPVLDSDGSFFLYSKLTVDKSRWQQGNVFSCSVMHEALHNHYTQKSLSLSPG

SEQ ID NO: 1835 - protein, 373 aa, synthetic construct
MKHLWFFLLLVAAPRWVLSEVQLVESGGGLVQPGGSLRLSCAASGFTFSGNWMGWFRQAPGKEREFVAGVNSNGYINYADSVKGRFTISADNSKNTAYLQMNSLKPEDTAVYYCAADVWYGSTWRNWGQGTLVTVSSGGGGSEPKSSDKTHTCPPCPAPELLGGPSVFLFPPKPKDTLMISRTPEVTCVVVDVSHEDPEVKFNWYVDGVEVHNAKTKPREEQYNSTYRVVSVLTVLHQDWLNGKEYKCKVSNKALPAPIEKTISKAKGQPREPQVYTLPPSREEMTKNQVSLTCLVKGFYPSDIAVEWESNGQPENNYKTTPPVLDSDGSFFLYSKLTVDKSRWQQGNVFSCSVMHEALHNHYTQKSLSLSPG

SEQ ID NO: 1836 - protein, 373 aa, synthetic construct
MKHLWFFLLLVAAPRWVLSEVQLVESGGGLVQPGGSLRLSCAASGFTFDRSWMGWFRQAPGKERELVASITSGGTTSYADSVKGRFTISADNSKNTAYLQMNSLKPEDTAVYYCAADVWYGSTWRNWGQGTLVTVSSGGGGSEPKSSDKTHTCPPCPAPELLGGPSVFLFPPKPKDTLMISRTPEVTCVVVDVSHEDPEVKFNWYVDGVEVHNAKTKPREEQYNSTYRVVSVLTVLHQDWLNGKEYKCKVSNKALPAPIEKTISKAKGQPREPQVYTLPPSREEMTKNQVSLTCLVKGFYPSDIAVEWESNGQPENNYKTTPPVLDSDGSFFLYSKLTVDKSRWQQGNVFSCSVMHEALHNHYTQKSLSLSPG

SEQ ID NO: 1837 - protein, 373 aa, synthetic construct
MKHLWFFLLLVAAPRWVLSEVQLVESGGGLVQPGGSLRLSCAASGFTFSGNWMGWFRQAPGKEREWVVGISSGGTPHYADSVKGRFTISADNSKNTAYLQMNSLKPEDTAVYYCAADVWYGSTWRNWGQGTLVTVSSGGGGSEPKSSDKTHTCPPCPAPELLGGPSVFLFPPKPKDTLMISRTPEVTCVVVDVSHEDPEVKFNWYVDGVEVHNAKTKPREEQYNSTYRVVSVLTVLHQDWLNGKEYKCKVSNKALPAPIEKTISKAKGQPREPQVYTLPPSREEMTKNQVSLTCLVKGFYPSDIAVEWESNGQPENNYKTTPPVLDSDGSFFLYSKLTVDKSRWQQGNVFSCSVMHEALHNHYTQKSLSLSPG

SEQ ID NO: 1838 - protein, 373 aa, synthetic construct
MKHLWFFLLLVAAPRWVLSEVQLVESGGGLVQPGGSLRLSCAASGFTLSSNWMGWFRQAPGKERELVAGVNSNGYINYADSVKGRFTISADNSKNTAYLQMNSLKPEDTAVYYCAADVWYGSTWRNWGQGTLVTVSSGGGGSEPKSSDKTHTCPPCPAPELLGGPSVFLFPPKPKDTLMISRTPEVTCVVVDVSHEDPEVKFNWYVDGVEVHNAKTKPREEQYNSTYRVVSVLTVLHQDWLNGKEYKCKVSNKALPAPIEKTISKAKGQPREPQVYTLPPSREEMTKNQVSLTCLVKGFYPSDIAVEWESNGQPENNYKTTPPVLDSDGSFFLYSKLTVDKSRWQQGNVFSCSVMHEALHNHYTQKSLSLSPG

SEQ ID NO: 1839 - protein, 373 aa, synthetic construct
MKHLWFFLLLVAAPRWVLSEVQLVESGGGLVQPGGSLRLSCAASGFDFSVSWMGWFRQAPGKERELVARISSGGELPYYADSVKGRFTISADNSKNTAYLQMNSLKPKHTAVYYCAARPNTRPGSMWGQGTLVTVSSGGGGSEPKSSDKTHTCPPCPAPELLGGPSVFLFPPKPKDTLMISRTPEVTCVVVDVSHEDPEVKFNWYVDGVEVHNAKTKPREEQYNSTYRVVSVLTVLHQDWLNGKEYKCKVSNKALPAPIEKTISKAKGQPREPQVYTLPPSREEMTKNQVSLTCLVKGFYPSDIAVEWESNGQPENNYKTTPPVLDSDGSFFLYSKLTVDKSRWQQGNVFSCSVMHEALHNHYTQKSLSLSPG

SEQ ID NO: 1840 - protein, 373 aa, synthetic construct
MKHLWFFLLLVAAPRWVLSEVQLVESGGGLVQPGGSLRLSCAASGFTMSSSWMGWFRQAPGKEREFVGGISSGGSTYYADSVKGRFTISADNSKNTAYLQMNSLKPEDTAVYYCAADVWYGSTWRNWGQGTLVTVSSGGGGSEPKSSDKTHTCPPCPAPELLGGPSVFLFPPKPKDTLMISRTPEVTCVVVDVSHEDPEVKFNWYVDGVEVHNAKTKPREEQYNSTYRVVSVLTVLHQDWLNGKEYKCKVSNKALPAPIEKTISKAKGQPREPQVYTLPPSREEMTKNQVSLTCLVKGFYPSDIAVEWESNGQPENNYKTTPPVLDSDGSFFLYSKLTVDKSRWQQGNVFSCSVMHEALHNHYTQKSLSLSPG

SEQ ID NO: 1841 - protein, 375 aa, synthetic construct
MKHLWFFLLLVAAPRWVLSEVQLVESGGGLVQPGGSLRLSCAASGRNFRRNSMGWFRQAPGKEREFVAVITRSGGGEVTTYADSVKGRFTISADNSKNTAYLQMNSLKPEDTAVYYCAMSSVTRGSSDWGQGTLVTVSSGGGGSEPKSSDKTHTCPPCPAPELLGGPSVFLFPPKPKDTLMISRTPEVTCVVVDVSHEDPEVKFNWYVDGVEVHNAKTKPREEQYNSTYRVVSVLTVLHQDWLNGKEYKCKVSNKALPAPIEKTISKAKGQPREPQVYTLPPSREEMTKNQVSLTCLVKGFYPSDIAVEWESNGQPENNYKTTPPVLDSDGSFFLYSKLTVDKSRWQQGNVFSCSVMHEALHNHYTQKSLSLSPG

SEQ ID NO: 1842 - protein, 373 aa, synthetic construct
MKHLWFFLLLVAAPRWVLSEVQLVESGGGLVQPGGSLRLSCAASGFTFDRSWMGWFRQAPGKEREFVAGITSSGIPNYADSVKGRFTISADNSKNTAYLQMNSLKPEDTAVYYCAADVWYGSTWRNWGQGTLVTVSSGGGGSEPKSSDKTHTCPPCPAPELLGGPSVFLFPPKPKDTLMISRTPEVTCVVVDVSHEDPEVKFNWYVDGVEVHNAKTKPREEQYNSTYRVVSVLTVLHQDWLNGKEYKCKVSNKALPAPIEKTISKAKGQPREPQVYTLPPSREEMTKNQVSLTCLVKGFYPSDIAVEWESNGQPENNYKTTPPVLDSDGSFFLYSKLTVDKSRWQQGNVFSCSVMHEALHNHYTQKSLSLSPG

SEQ ID NO: 1843 - protein, 371 aa, synthetic construct
MKHLWFFLLLVAAPRWVLSEVQLVESGGGLVQPGGSLRLSCAASGLTISTYNMGWFRQAPGKERELVSAIGWSGASTYYADSVKGRFTISADNSKNTAYLQMNSLKPEDTAVYYCAAFRGRMYDWGQGTLVTVSSGGGGSEPKSSDKTHTCPPCPAPELLGGPSVFLFPPKPKDTLMISRTPEVTCVVVDVSHEDPEVKFNWYVDGVEVHNAKTKPREEQYNSTYRVVSVLTVLHQDWLNGKEYKCKVSNKALPAPIEKTISKAKGQPREPQVYTLPPSREEMTKNQVSLTCLVKGFYPSDIAVEWESNGQPENNYKTTPPVLDSDGSFFLYSKLTVDKSRWQQGNVFSCSVMHEALHNHYTQKSLSLSPG

SEQ ID NO: 1844 - protein, 373 aa, synthetic construct
MKHLWFFLLLVAAPRWVLSEVQLVESGGGLVQPGGSLRLSCAASGFTFSTSWMGWFRQAPGKERELVAAVTSGGNTNYADSVKGRFTISADNSKNTAYLQMNSLKPEDTAVYYCAADVWYGSTWRNWGQGTLVTVSSGGGGSEPKSSDKTHTCPPCPAPELLGGPSVFLFPPKPKDTLMISRTPEVTCVVVDVSHEDPEVKFNWYVDGVEVHNAKTKPREEQYNSTYRVVSVLTVLHQDWLNGKEYKCKVSNKALPAPIEKTISKAKGQPREPQVYTLPPSREEMTKNQVSLTCLVKGFYPSDIAVEWESNGQPENNYKTTPPVLDSDGSFFLYSKLTVDKSRWQQGNVFSCSVMHEALHNHYTQKSLSLSPG

SEQ ID NO: 1845 - protein, 371 aa, synthetic construct
MKHLWFFLLLVAAPRWVLSEVQLVESGGGLVQPGGSLRLSCAASGRTFGDYIMGWFRQAPGKERELVAEITRVGNTNYADSVKGRFTISADNSKNTAYLQMNSLKPEDTAVYYCAAVFSRGPLTWGQGTLVTVSSGGGGSEPKSSDKTHTCPPCPAPELLGGPSVFLFPPKPKDTLMISRTPEVTCVVVDVSHEDPEVKFNWYVDGVEVHNAKTKPREEQYNSTYRVVSVLTVLHQDWLNGKEYKCKVSNKALPAPIEKTISKAKGQPREPQVYTLPPSREEMTKNQVSLTCLVKGFYPSDIAVEWESNGQPENNYKTTPPVLDSDGSFFLYSKLTVDKSRWQQGNVFSCSVMHEALHNHYTQKSLSLSPG

SEQ ID NO: 1846 - protein, 375 aa, synthetic construct
MKHLWFFLLLVAAPRWVLSEVQLVESGGGLVQPGGSLRLSCAASGRIFRRNSMGWFRQAPGKEREFVAVITRSGGGEVTTYADSVKGRFTINADNSKNTAYLQMNSLKPEDTAVYYCAMSSVTRGSSDWGQGTLVTVSTGGGGSEPKSSDKTHTCPPCPAPELLGGPSVFLFPPKPKDTLMISRTPEVTCVVVDVSHEDPEVKFNWYVDGVEVHNAKTKPREEQYNSTYRVVSVLTVLHQDWLNGKEYKCKVSNKALPAPIEKTISKAKGQPREPQVYTLPPSREEMTKNQVSLTCLVKGFYPSDIAVEWESNGQPENNYKTTPPVLDSDGSFFLYSKLTVDKSRWQQGNVFSCSVMHEALHNHYTQKSLSLSPG

SEQ ID NO: 1847 - protein, 9 aa, synthetic construct
FTFSNYGVS

SEQ ID NO: 1848 - protein, 9 aa, synthetic construct
FTFVRYDMA

SEQ ID NO: 1849 - protein, 9 aa, synthetic construct
FTFSKYGMS

SEQ ID NO: 1850 - protein, 9 aa, synthetic construct
FTFSRYFMG

SEQ ID NO: 1851 - protein, 9 aa, synthetic construct
FTFHKYGMT

SEQ ID NO: 1852 - protein, 9 aa, synthetic construct
FTFSRYVMG

SEQ ID NO: 1853 - protein, 9 aa, synthetic construct
FTFSTYAMN

SEQ ID NO: 1854 - protein, 9 aa, synthetic construct
CTFSSYLMS

SEQ ID NO: 1855 - protein, 9 aa, synthetic construct
FTFNAYPMT

SEQ ID NO: 1856 - protein, 9 aa, synthetic construct
FTFHKYGMA

SEQ ID NO: 1857 - protein, 9 aa, synthetic construct
FTFHKYGMA

SEQ ID NO: 1858 - protein, 9 aa, synthetic construct
FTFSPYSMS

SEQ ID NO: 1859 - protein, 9 aa, synthetic construct
FTFSRYFMG

SEQ ID NO: 1860 - protein, 9 aa, synthetic construct
FTFSSYFMS

SEQ ID NO: 1861 - protein, 9 aa, synthetic construct
FTFSRYIMG

SEQ ID NO: 1862 - protein, 9 aa, synthetic construct
FTFSNYGVS

SEQ ID NO: 1863 - protein, 9 aa, synthetic construct
FTFSRYAMN

SEQ ID NO: 1864 - protein, 9 aa, synthetic construct
FTFSRYFMG

SEQ ID NO: 1865 - protein, 9 aa, synthetic construct
FTFHKYGMA

SEQ ID NO: 1866 - protein, 9 aa, synthetic construct
FTFSKYGVS

SEQ ID NO: 1867 - protein, 9 aa, synthetic construct
FTFSSYFMS

SEQ ID NO: 1868 - protein, 9 aa, synthetic construct
FTFSSYLMS

SEQ ID NO: 1869 - protein, 9 aa, synthetic construct
FTFSRYVMN

SEQ ID NO: 1870 - protein, 9 aa, synthetic construct
FTFSNYGVS

SEQ ID NO: 1871 - protein, 9 aa, synthetic construct
FTFEDETMS

SEQ ID NO: 1872 - protein, 9 aa, synthetic construct
FTFSNYGVS

SEQ ID NO: 1873 - protein, 9 aa, synthetic construct
FTFSNYGVS

SEQ ID NO: 1874 - protein, 9 aa, synthetic construct
FTFSNYGVS

SEQ ID NO: 1875 - protein, 9 aa, synthetic construct
FTFSNYGVS

SEQ ID NO: 1876 - protein, 9 aa, synthetic construct
FTFNAYPMT

SEQ ID NO: 1877 - protein, 9 aa, synthetic construct
FTFEHNDMH

SEQ ID NO: 1878 - protein, 9 aa, synthetic construct
LHSRSYVMG

SEQ ID NO: 1879 - protein, 9 aa, synthetic construct
FTFDKYDMA

SEQ ID NO: 1880 - protein, 9 aa, synthetic construct
FTFNKYPMM

SEQ ID NO: 1881 - protein, 9 aa, synthetic construct
FTFSRYAMN

SEQ ID NO: 1882 - protein, 9 aa, synthetic construct
FTFNADPMS

SEQ ID NO: 1883 - protein, 9 aa, synthetic construct
FTFEVYTMA

SEQ ID NO: 1884 - protein, 9 aa, synthetic construct
FTFHKYGMT

SEQ ID NO: 1885 - protein, 9 aa, synthetic construct
FTFNKYPMM

SEQ ID NO: 1886 - protein, 9 aa, synthetic construct
SSVSRYVMG

SEQ ID NO: 1887 - protein, 9 aa, synthetic construct
FTFPVYNMA

SEQ ID NO: 1888 - protein, 9 aa, synthetic construct
FTFSSYFMS

SEQ ID NO: 1889 - protein, 9 aa, synthetic construct
FTFSRYFMG

SEQ ID NO: 1890 - protein, 9 aa, synthetic construct
FTFEPVIMG

SEQ ID NO: 1891 - protein, 9 aa, synthetic construct
FTFHKYGMA

SEQ ID NO: 1892 - protein, 9 aa, synthetic construct
FTFEPVIMG

SEQ ID NO: 1893 - protein, 9 aa, synthetic construct
FTFHKYGMA

SEQ ID NO: 1894 - protein, 9 aa, synthetic construct
FTFHKYGMA

SEQ ID NO: 1895 - protein, 9 aa, synthetic construct
FTFSNYGVS

SEQ ID NO: 1896 - protein, 13 aa, synthetic construct
GYINPSRGYTYYA

SEQ ID NO: 1897 - protein, 13 aa, synthetic construct
STISSGGDYTYYP

SEQ ID NO: 1898 - protein, 13 aa, synthetic construct
SYINSSRGYTYYA

SEQ ID NO: 1899 - protein, 13 aa, synthetic construct
SEISPSGKKKYYA

SEQ ID NO: 1900 - protein, 13 aa, synthetic construct
SAISSGGGYTYYP

SEQ ID NO: 1901 - protein, 13 aa, synthetic construct
SEISPSGKKKYYA

SEQ ID NO: 1902 - protein, 13 aa, synthetic construct
TEISPSGKKKYYA

SEQ ID NO: 1903 - protein, 12 aa, synthetic construct
GVIWGGGGTYYA

SEQ ID NO: 1904 - protein, 13 aa, synthetic construct
SGITGSGGSTYYA

SEQ ID NO: 1905 - protein, 13 aa, synthetic construct
STISSGGGYTYYP

SEQ ID NO: 1906 - protein, 13 aa, synthetic construct
STISSGGGYTYYP

SEQ ID NO: 1907 - protein, 13 aa, synthetic construct
SEISPSGKKKYYA

SEQ ID NO: 1908 - protein, 13 aa, synthetic construct
SEISPSGKKKYYA

SEQ ID NO: 1909 - protein, 12 aa, synthetic construct
GVIWGGGGTYYA

SEQ ID NO: 1910 - protein, 13 aa, synthetic construct
SEISLIGKKKYYA

SEQ ID NO: 1911 - protein, 13 aa, synthetic construct
GYINRSREYTYYA

SEQ ID NO: 1912 - protein, 13 aa, synthetic construct
SEISPSGKKKYYA

SEQ ID NO: 1913 - protein, 13 aa, synthetic construct
SEISPSGKKKYYA

SEQ ID NO: 1914 - protein, 13 aa, synthetic construct
STISGGGGYTYYP

SEQ ID NO: 1915 - protein, 13 aa, synthetic construct
CYINSGSGYTYYA

SEQ ID NO: 1916 - protein, 12 aa, synthetic construct
GVIWGGGGTYYA

SEQ ID NO: 1917 - protein, 12 aa, synthetic construct
GVIWGGGGTYYA

SEQ ID NO: 1918 - protein, 13 aa, synthetic construct
SEISPSGKKKYYA

SEQ ID NO: 1919 - protein, 13 aa, synthetic construct
GYINPSRGYTYYA

SEQ ID NO: 1920 - protein, 13 aa, synthetic construct
SAISGSGGGTSYA

SEQ ID NO: 1921 - protein, 13 aa, synthetic construct
SWISPHGALTYYA

SEQ ID NO: 1922 - protein, 13 aa, synthetic construct
SSIDWHGWVTYYA

SEQ ID NO: 1923 - protein, 13 aa, synthetic construct
VYINPSRGYTYYA

SEQ ID NO: 1924 - protein, 13 aa, synthetic construct
SWISPHGALTYYA

SEQ ID NO: 1925 - protein, 13 aa, synthetic construct
SAITGSGGSTYYA

SEQ ID NO: 1926 - protein, 13 aa, synthetic construct
SGISPSGGITTYA

SEQ ID NO: 1927 - protein, 13 aa, synthetic construct
SEISRSGKKKYYA

SEQ ID NO: 1928 - protein, 13 aa, synthetic construct
STICSGGDYTYYP

SEQ ID NO: 1929 - protein, 13 aa, synthetic construct
STIGPSGTSTYYA

SEQ ID NO: 1930 - protein, 13 aa, synthetic construct
SEISPSGKKKYYA

SEQ ID NO: 1931 - protein, 13 aa, synthetic construct
SAITGSGGSTYYA

SEQ ID NO: 1932 - protein, 13 aa, synthetic construct
SSIHPKGYPTRYA

SEQ ID NO: 1933 - protein, 13 aa, synthetic construct
SSISSGGGYTYYP

SEQ ID NO: 1934 - protein, 12 aa, synthetic construct
SGITRSGSTNYR

SEQ ID NO: 1935 - protein, 13 aa, synthetic construct
SEISRIGKKKCYA

SEQ ID NO: 1936 - protein, 13 aa, synthetic construct
SGIYPSGGSTVYA

SEQ ID NO: 1937 - protein, 12 aa, synthetic construct
GVIWGGGGTYYA

SEQ ID NO: 1938 - protein, 13 aa, synthetic construct
SEISPSGKKKYYA

SEQ ID NO: 1939 - protein, 13 aa, synthetic construct
SSISPNGWDTYYA

SEQ ID NO: 1940 - protein, 13 aa, synthetic construct
STISSGGGYTYYP

SEQ ID NO: 1941 - protein, 13 aa, synthetic construct
SSISPNGWDTYYA

SEQ ID NO: 1942 - protein, 13 aa, synthetic construct
STISSGGGYTYYP

SEQ ID NO: 1943 - protein, 13 aa, synthetic construct
STISSGGGYTYYP

SEQ ID NO: 1944 - protein, 13 aa, synthetic construct
GYINPSRGYTYYA

SEQ ID NO: 1945 - protein, 12 aa, synthetic construct
CARSYGGGFDYW

SEQ ID NO: 1946 - protein, 12 aa, synthetic construct
CAKDTYNHFDYW

SEQ ID NO: 1947 - protein, 12 aa, synthetic construct
CARSSGGGFDYW

SEQ ID NO: 1948 - protein, 14 aa, synthetic construct
CAKSSFDKYNFDYW

SEQ ID NO: 1949 - protein, 12 aa, synthetic construct
CARDTYLHFDYW

SEQ ID NO: 1950 - protein, 14 aa, synthetic construct
CAKSSFDKYNFDYW

SEQ ID NO: 1951 - protein, 14 aa, synthetic construct
CAKSSFDKYNFDYW

SEQ ID NO: 1952 - protein, 11 aa, synthetic construct
CAKGGTSFDYW

SEQ ID NO: 1953 - protein, 15 aa, synthetic construct
CARDGSYSSSWYGYW

SEQ ID NO: 1954 - protein, 12 aa, synthetic construct
CARDTYLHFEYW

SEQ ID NO: 1955 - protein, 12 aa, synthetic construct
CARDTYLHFDYW

SEQ ID NO: 1956 - protein, 14 aa, synthetic construct
CARSSFDKYNFDYW

SEQ ID NO: 1957 - protein, 14 aa, synthetic construct
CAKSSFDKYNFDYW

SEQ ID NO: 1958 - protein, 11 aa, synthetic construct
CAKGGTSFDYW

SEQ ID NO: 1959 - protein, 14 aa, synthetic construct
CAKSSFDKYNFDYW

SEQ ID NO: 1960 - protein, 12 aa, synthetic construct
CARSYGGGFDYW

SEQ ID NO: 1961 - protein, 14 aa, synthetic construct
CAKSSFDKYNFDYW

SEQ ID NO: 1962 - protein, 14 aa, synthetic construct
CAKSSFDKYNFDYW

SEQ ID NO: 1963 - protein, 12 aa, synthetic construct
CARDTYLHFDYW

SEQ ID NO: 1964 - protein, 12 aa, synthetic construct
CARASYVHFDYW

SEQ ID NO: 1965 - protein, 11 aa, synthetic construct
CAKGGTSFDYW

SEQ ID NO: 1966 - protein, 11 aa, synthetic construct
CAKGGTSFDYW

SEQ ID NO: 1967 - protein, 14 aa, synthetic construct
CAKSSFDKYNFDYW

SEQ ID NO: 1968 - protein, 12 aa, synthetic construct
CARSYGGGFDYW

SEQ ID NO: 1969 - protein, 13 aa, synthetic construct
CARDVIAGPFDYW

SEQ ID NO: 1970 - protein, 11 aa, synthetic construct
CAKGRRRFDYW

SEQ ID NO: 1971 - protein, 11 aa, synthetic construct
CVKNALRFDYW

SEQ ID NO: 1972 - protein, 12 aa, synthetic construct
CARSYGGGFDYW

SEQ ID NO: 1973 - protein, 11 aa, synthetic construct
CAKGRRRFDYW

SEQ ID NO: 1974 - protein, 12 aa, synthetic construct
CARVWRNHLDYW

SEQ ID NO: 1975 - protein, 19 aa, synthetic construct
CAKQAPGEKWLARGRLDYW

SEQ ID NO: 1976 - protein, 14 aa, synthetic construct
CAKSSFGEYNFDYW

SEQ ID NO: 1977 - protein, 12 aa, synthetic construct
CARDTYIHFDYW

SEQ ID NO: 1978 - protein, 13 aa, synthetic construct
CARRSYFRRFDYW

SEQ ID NO: 1979 - protein, 14 aa, synthetic construct
CAKSSFDKYNFDYW

SEQ ID NO: 1980 - protein, 15 aa, synthetic construct
CARDGSYSSSWYGYW

SEQ ID NO: 1981 - protein, 12 aa, synthetic construct
CAKGWFGNFDYW

SEQ ID NO: 1982 - protein, 12 aa, synthetic construct
CARDTYLHFDYW

SEQ ID NO: 1983 - protein, 12 aa, synthetic construct
CAKKLSNGFDYW

SEQ ID NO: 1984 - protein, 14 aa, synthetic construct
CEKSSFDKYNFDYW

SEQ ID NO: 1985 - protein, 16 aa, synthetic construct
CARHRAGSSGWYSDYW

SEQ ID NO: 1986 - protein, 11 aa, synthetic construct
CAKGGTSFDYW

SEQ ID NO: 1987 - protein, 14 aa, synthetic construct
CAKSSFDKYNFHYW

SEQ ID NO: 1988 - protein, 11 aa, synthetic construct
CATETSPNDYW

SEQ ID NO: 1989 - protein, 12 aa, synthetic construct
CARDTYLHFDYW

SEQ ID NO: 1990 - protein, 11 aa, synthetic construct
CATETSPNDYW

SEQ ID NO: 1991 - protein, 12 aa, synthetic construct
CARDTYLHFDYW

SEQ ID NO: 1992 - protein, 12 aa, synthetic construct
CARDTYLHFDYW

SEQ ID NO: 1993 - protein, 12 aa, synthetic construct
CARSYGGGFDYW

SEQ ID NO: 1994 - protein, 11 aa, synthetic construct
RASQTIERRLN

SEQ ID NO: 1995 - protein, 11 aa, synthetic construct
RASHGVRTSLA

SEQ ID NO: 1996 - protein, 11 aa, synthetic construct
RATQAIERRLK

SEQ ID NO: 1997 - protein, 11 aa, synthetic construct
SASQDINKYLN

SEQ ID NO: 1998 - protein, 11 aa, synthetic construct
RASQGVRTSLA

SEQ ID NO: 1999 - protein, 11 aa, synthetic construct
SASHDINEYLN

SEQ ID NO: 2000 - protein, 11 aa, synthetic construct
RPAHNIGNFLN

SEQ ID NO: 2001 - protein, 11 aa, synthetic construct
RASQNIRSYLN

SEQ ID NO: 2002 - protein, 11 aa, synthetic construct
SGNKLGDKYAS

SEQ ID NO: 2003 - protein, 11 aa, synthetic construct
RASQGVRTSLA

SEQ ID NO: 2004 - protein, 11 aa, synthetic construct
RASQGVRTSLA

SEQ ID NO: 2005 - protein, 11 aa, synthetic construct
SASQDIRRYLN

SEQ ID NO: 2006 - protein, 11 aa, synthetic construct
SASQDINKYLN

SEQ ID NO: 2007 - protein, 11 aa, synthetic construct
RASQNIRSYLN

SEQ ID NO: 2008 - protein, 11 aa, synthetic construct
SAYQDINKYLN

SEQ ID NO: 2009 - protein, 11 aa, synthetic construct
RASQTIERRLN

SEQ ID NO: 2010 - protein, 11 aa, synthetic construct
RASQDIGNFLN

SEQ ID NO: 2011 - protein, 11 aa, synthetic construct
RASQSISSYVN

SEQ ID NO: 2012 - protein, 11 aa, synthetic construct
RASQVVSTSLS

SEQ ID NO: 2013 - protein, 11 aa, synthetic construct
RATQTIETSLK

SEQ ID NO: 2014 - protein, 11 aa, synthetic construct
RASQNIRSYLN

SEQ ID NO: 2015 - protein, 11 aa, synthetic construct
RASQNIRSYLN

SEQ ID NO: 2016 - protein, 11 aa, synthetic construct
CASQDINKFLN

SEQ ID NO: 2017 - protein, 11 aa, synthetic construct
RASQTIERRLN

SEQ ID NO: 2018 - protein, 13 aa, synthetic construct
AASGFNIKDTYIH

SEQ ID NO: 2019 - protein, 11 aa, synthetic construct
RASQTISSYLN

SEQ ID NO: 2020 - protein, 11 aa, synthetic construct
SASQDINKYLN

SEQ ID NO: 2021 - protein, 11 aa, synthetic construct
RASQTIERRLN

SEQ ID NO: 2022 - protein, 11 aa, synthetic construct
RASQTISSYLN

SEQ ID NO: 2023 - protein, 11 aa, synthetic construct
SGDKLGHTYTS

SEQ ID NO: 2024 - protein, 11 aa, synthetic construct
RANQNIGNFLN

SEQ ID NO: 2025 - protein, 11 aa, synthetic construct
SASQDINKYLN

SEQ ID NO: 2026 - protein, 11 aa, synthetic construct
RASHGVRTSLA

SEQ ID NO: 2027 - protein, 11 aa, synthetic construct
RATQSIRSFLN

SEQ ID NO: 2028 - protein, 11 aa, synthetic construct
RASQDIGNFLN

SEQ ID NO: 2029 - protein, 11 aa, synthetic construct
SGNKLGDKYAS

SEQ ID NO: 2030 - protein, 11 aa, synthetic construct
RASQGVRTSLA

SEQ ID NO: 2031 - protein, 11 aa, synthetic construct
RASQGVRTSLA

SEQ ID NO: 2032 - protein, 11 aa, synthetic construct
RASQRISSFLN

SEQ ID NO: 2033 - protein, 11 aa, synthetic construct
CASQDINKYLN

SEQ ID NO: 2034 - protein, 11 aa, synthetic construct
RASQSVDRYFN

SEQ ID NO: 2035 - protein, 11 aa, synthetic construct
RASQNIRSYLN

SEQ ID NO: 2036 - protein, 11 aa, synthetic construct
SASQDINKYLN

SEQ ID NO: 2037 - protein, 16 aa, synthetic construct
RSSQSLVHSTGNTYLH

SEQ ID NO: 2038 - protein, 11 aa, synthetic construct
RASQGVRTSLA

SEQ ID NO: 2039 - protein, 16 aa, synthetic construct
RSSQSLVHSTGNTYLH

SEQ ID NO: 2040 - protein, 11 aa, synthetic construct
RASQGVRTSLA

SEQ ID NO: 2041 - protein, 11 aa, synthetic construct
RASQGVRTSLA

SEQ ID NO: 2042 - protein, 11 aa, synthetic construct
GASQTIERRLN

SEQ ID NO: 2043 - protein, 7 aa, synthetic construct
DASSLHT

SEQ ID NO: 2044 - protein, 7 aa, synthetic construct
GKNNRPT

SEQ ID NO: 2045 - protein, 7 aa, synthetic construct
DNSSRQT

SEQ ID NO: 2046 - protein, 7 aa, synthetic construct
HTSRLQS

SEQ ID NO: 2047 - protein, 7 aa, synthetic construct
AKNNRPS

SEQ ID NO: 2048 - protein, 7 aa, synthetic construct
HTSRLQS

SEQ ID NO: 2049 - protein, 7 aa, synthetic construct
KTTWLHS

SEQ ID NO: 2050 - protein, 7 aa, synthetic construct
GKNIRPS

SEQ ID NO: 2051 - protein, 7 aa, synthetic construct
RISWLQS

SEQ ID NO: 2052 - protein, 7 aa, synthetic construct
AKNNRPS

SEQ ID NO: 2053 - protein, 7 aa, synthetic construct
AINNRPS

SEQ ID NO: 2054 - protein, 7 aa, synthetic construct
HTSTLQS

SEQ ID NO: 2055 - protein, 7 aa, synthetic construct
HTSRLQS

SEQ ID NO: 2056 - protein, 7 aa, synthetic construct
GKNIRPS

SEQ ID NO: 2057 - protein, 7 aa, synthetic construct
HKSRLQS

SEQ ID NO: 2058 - protein, 7 aa, synthetic construct
DTSSRHT

SEQ ID NO: 2059 - protein, 7 aa, synthetic construct
RTSWLQS

SEQ ID NO: 2060 - protein, 7 aa, synthetic construct
RASTLAS

SEQ ID NO: 2061 - protein, 7 aa, synthetic construct
ANNNRAS

SEQ ID NO: 2062 - protein, 7 aa, synthetic construct
DKNSLQT

SEQ ID NO: 2063 - protein, 7 aa, synthetic construct
GKNIRPS

SEQ ID NO: 2064 - protein, 7 aa, synthetic construct
GKNIRPS

SEQ ID NO: 2065 - protein, 7 aa, synthetic construct
HTSRLQS

SEQ ID NO: 2066 - protein, 7 aa, synthetic construct
DASSLHT

SEQ ID NO: 2067 - protein, 7 aa, synthetic construct
GTTSLES

SEQ ID NO: 2068 - protein, 7 aa, synthetic construct
ENNNRPS

SEQ ID NO: 2069 - protein, 7 aa, synthetic construct
HTSRLQS

SEQ ID NO: 2070 - protein, 7 aa, synthetic construct
DASSLHT

SEQ ID NO: 2071 - protein, 7 aa, synthetic construct
ENNNRPS

SEQ ID NO: 2072 - protein, 7 aa, synthetic construct
RASTLAS

SEQ ID NO: 2073 - protein, 7 aa, synthetic construct
HTSRLQD

SEQ ID NO: 2074 - protein, 7 aa, synthetic construct
HTSRLQS

SEQ ID NO: 2075 - protein, 7 aa, synthetic construct
GKNNRPT

SEQ ID NO: 2076 - protein, 7 aa, synthetic construct
KVSNRFS

SEQ ID NO: 2077 - protein, 7 aa, synthetic construct
RTSWLQS

SEQ ID NO: 2078 - protein, 7 aa, synthetic construct
RTTWLQS

SEQ ID NO: 2079 - protein, 7 aa, synthetic construct
GKNIRPI

SEQ ID NO: 2080 - protein, 7 aa, synthetic construct
AKNNRPS

SEQ ID NO: 2081 - protein, 7 aa, synthetic construct
GKNIRPS

SEQ ID NO: 2082 - protein, 7 aa, synthetic construct
HTSRLQS

SEQ ID NO: 2083 - protein, 7 aa, synthetic construct
AASSLYS

SEQ ID NO: 2084 - protein, 7 aa, synthetic construct
GKNIRPS

SEQ ID NO: 2085 - protein, 7 aa, synthetic construct
HTSTLQS

SEQ ID NO: 2086 - protein, 7 aa, synthetic construct
QMSHLAS

SEQ ID NO: 2087 - protein, 7 aa, synthetic construct
AKNNRPS

SEQ ID NO: 2088 - protein, 7 aa, synthetic construct
QMSHLAS

SEQ ID NO: 2089 - protein, 7 aa, synthetic construct
AKNNRPS

SEQ ID NO: 2090 - protein, 7 aa, synthetic construct
ALNNRPS

SEQ ID NO: 2091 - protein, 7 aa, synthetic construct
DASSLHT

SEQ ID NO: 2092 - protein, 11 aa, synthetic construct [sequence omitted]

SEQ ID NO: 2093 - protein, 11 aa, synthetic construct
CQQSLAPPYTF

SEQ ID NO: 2094 - protein, 11 aa, synthetic construct [sequence omitted]

SEQ ID NO: 2095 - protein, 11 aa, synthetic construct
CQQYTYFPATF

SEQ ID NO: 2096 - protein, 11 aa, synthetic construct [sequence omitted]

SEQ ID NO: 2097 - protein, 11 aa, synthetic construct
CQQFAYFPATF

SEQ ID NO: 2098 - protein, 11 aa, synthetic construct
CRHRSSYLPTF

SEQ ID NO: 2099 - protein, 11 aa, synthetic construct
CQQYASVPVTF

SEQ ID NO: 2100 - protein, 14 aa, synthetic construct
CVARPLRGNPHVLF

SEQ ID NO: 2101 - protein, 11 aa, synthetic construct [sequence omitted]

SEQ ID NO: 2102 - protein, 11 aa, synthetic construct [sequence omitted]

SEQ ID NO: 2103 - protein, 7 aa, synthetic construct
CQQYRLF

SEQ ID NO: 2104 - protein, 8 aa, synthetic construct
CQQYTYFF

SEQ ID NO: 2105 - protein, 11 aa, synthetic construct
CQQYASVPVTF

SEQ ID NO: 2106 - protein, 11 aa, synthetic construct
CQQFAYFPATF

SEQ ID NO: 2107 - protein, 11 aa, synthetic construct [sequence omitted]

SEQ ID NO: 2108 - protein, 11 aa, synthetic construct
CQQRSSYPPTF

SEQ ID NO: 2109 - protein, 11 aa, synthetic construct
CQQFAYFPATF

SEQ ID NO: 2110 - protein, 11 aa, synthetic construct [sequence omitted]

SEQ ID NO: 2111 - protein, 11 aa, synthetic construct [sequence omitted]

SEQ ID NO: 2112 - protein, 11 aa, synthetic construct
CQQYASVPVTF

SEQ ID NO: 2113 - protein, 11 aa, synthetic construct
CQQYASVPVTF

SEQ ID NO: 2114 - protein, 11 aa, synthetic construct
CQQFASFPATF

SEQ ID NO: 2115 - protein, 11 aa, synthetic construct [sequence omitted]

SEQ ID NO: 2116 - protein, 11 aa, synthetic construct
CQQSYSTPRTF

SEQ ID NO: 2117 - protein, 11 aa, synthetic construct [sequence omitted]

SEQ ID NO: 2118 - protein, 11 aa, synthetic construct
CQQVVWRPFTF

SEQ ID NO: 2119 - protein, 11 aa, synthetic construct [sequence omitted]

SEQ ID NO: 2120 - protein, 11 aa, synthetic construct [sequence omitted]

SEQ ID NO: 2121 - protein, 11 aa, synthetic construct
CQQGYTLPWTF

SEQ ID NO: 2122 - protein, 6 aa, synthetic construct
CQQLAF

SEQ ID NO: 2123 - protein, 11 aa, synthetic construct
CQQFAYFPATF

SEQ ID NO: 2124 - protein, 11 aa, synthetic construct [sequence omitted]

SEQ ID NO: 2125 - protein, 11 aa, synthetic construct
CQQYDAYPPTL

SEQ ID NO: 2126 - protein, 11 aa, synthetic construct
CQQRSSYSATF

SEQ ID NO: 2127 - protein, 14 aa, synthetic construct
CVARAVRGNPLVLF

SEQ ID NO: 2128 - protein, 11 aa, synthetic construct
CGQSYRYRLTF

SEQ ID NO: 2129 - protein, 11 aa, synthetic construct [sequence omitted]

SEQ ID NO: 2130 - protein, 11 aa, synthetic construct
CQQSYELPLTF

SEQ ID NO: 2131 - protein, 11 aa, synthetic construct
CQQFAYFPATF

SEQ ID NO: 2132 - protein, 11 aa, synthetic construct [sequence omitted]

SEQ ID NO: 2133 - protein, 11 aa, synthetic construct
CQQYASVPVTF

SEQ ID NO: 2134 - protein, 11 aa, synthetic construct
CQQFAYFPATF

SEQ ID NO: 2135 - protein, 10 aa, synthetic construct [sequence omitted]

SEQ ID NO: 2136 - protein, 11 aa, synthetic construct [sequence omitted]

SEQ ID NO: 2137 - protein, 10 aa, synthetic construct [sequence omitted]

SEQ ID NO: 2138 - protein, 11 aa, synthetic construct [sequence omitted]

SEQ ID NO: 2139 - protein, 11 aa, synthetic construct [sequence omitted]

SEQ ID NO: 2140 - protein, 11 aa, synthetic construct [sequence omitted]

SEQ ID NO: 2141 - protein, 117 aa, synthetic construct
EVQLLESGGGLVQPGGSLRLSCAASGFTFSNYGVSWVRQAPGKGLEWVGYINPSRGYTYYADSVKGRFTISRDNSKNTLYLQMNSLRAEDTAVYYCARSYGGGFDYWGQGTLVTVSS

SEQ ID NO: 2142 - protein, 117 aa, synthetic construct
EVQLLESGGGLVQPGGSLRLSCAASGFTFVRYDMAWVRQAPGKGLEWVSTISSGGDYTYYPDSVKGRFTISRDNSKNTLYLQMNSLRAEDTAVYYCAKDTYNHFDYWGQGTLVTVSS

SEQ ID NO: 2143 - protein, 117 aa, synthetic construct
EVQLLESGGGLVQPGGSLRLSCAASGFTFSKYGMSWVRQAPGKGLEWVSYINSSRGYTYYADSVKGRFTISRDNSKNTLYLQMNSLRAEDTAVYYCARSSGGGFDYWGQGTLVTVSS

SEQ ID NO: 2144 - protein, 119 aa, synthetic construct
EVQLLESGGGLVQPGGSLRLSCAASGFTFSRYFMGWVRQAPGKGLEWVSEISPSGKKKYYADSVKGRFTISRDNSKNTLYLQMNSLRAEDTAVYYCAKSSFDKYNFDYWGQGTLVTVSS

SEQ ID NO: 2145 - protein, 117 aa, synthetic construct
EVQLLESGGGLVQPGGSLRLSCAASGFTFHKYGMTWVRQAPGKGLEWVSAISSGGGYTYYPDSVKGRFTISRDNSKNTLYLQMNSLRAEDTAVYYCARDTYLHFDYWGQGTLVTVSS

SEQ ID NO: 2146 - protein, 119 aa, synthetic construct
EVQLLESGGGLVQPGGSLRLSCAASGFTFSRYVMGWVRQAPGKGLEWVSEISPSGKKKYYADSVKGRFTISRDNSKNTLYLQMNSLRAEDTAVYYCAKSSFDKYNFDYWGQGTLVTVSS

SEQ ID NO: 2147 - protein, 119 aa, synthetic construct
EVQLLESGGGLVQPGGSLRLSCAASGFTFSTYAMNWVRQAPGKGLEWVTEISPSGKKKYYADSVKGRFTISRDNSKNTLYLQMNSLRAEDTAVYYCAKSSFDKYNFDYWGQGTLVTVSS

SEQ ID NO: 2148 - protein, 115 aa, synthetic construct
EVQLLESGGGLVQPGGSLRLSCAASGCTFSSYLMSWVRQAPVKGLEWVGVIWGGGGTYYADSVKGRFTISRDNSKNTLYLQMNSLRAEDTAVYYCAKGGTSFDYWGQGTLVTVSS

SEQ ID NO: 2149 - protein, 120 aa, synthetic construct
EVQLLESGGGLVQPGGSLRLSCAASGFTFNAYPMTWVRQAPGKGLEWVSGITGSGGSTYYADSVKGGFTISRVNSKNTLYLQMNSLRTEDTAVYYCARDGSYSSSWYGYWGQGTLVTVSS

SEQ ID NO: 2150 - protein, 117 aa, synthetic construct
EVQLLESGGGLVQPGGSLRLSCAASGFTFHKYGMACVRQAHEKGLEWVSTISSGGGYTYYPDSVKGRLTISRDNSKNTLYLQMNSLRAEDTAVYYCARDTYLHFEYWGQGTLVTVSS

SEQ ID NO: 2151 - protein, 117 aa, synthetic construct
EVQLLESGGGLVQPGGSLRLSCAASGFTFHKYGMAWVRQAPGKGLEWVSTISSGGGYTYYPDSVKGRFTISRDNSKNTLYLQMNSLRAEDTAVYYCARDTYLHFDYWGQGTLVTVSS

SEQ ID NO: 2152 - protein, 119 aa, synthetic construct
EVQLLESGGGLVQPGGSLRLSCAASGFTFSPYSMSWVRQAPGKGLEWVSEISPSGKKKYYADSVKGRFTISRDNSKNTLYLQMNSLRAEDTAVYYCARSSFDKYNFDYWGQGTLVTVSS

SEQ ID NO: 2153 - protein, 119 aa, synthetic construct; identical to SEQ ID NO: 2144

SEQ ID NO: 2154 - protein, 115 aa, synthetic construct
EVQLLESGGGLVQPGGSLRLSCAASGFTFSSYFMSWVRQAPGKGLEWVGVIWGGGGTYYADSVKGRFTISRDNSKNTLYLQMNSLRAEDTAVYYCAKGGTSFDYWGQGTLVTVSS

SEQ ID NO: 2155 - protein, 119 aa, synthetic construct
EVQLLESGGGLVQPGGSLRLSCAASGFTFSRYIMGWVRQAPRKGLKWVSEISLIGKKKYYADSVKGRFTISRDNSKNTLYLQMNSLRAEDTAVYYCAKSSFDKYNFDYWGQGTLVTVSS

SEQ ID NO: 2156 - protein, 117 aa, synthetic construct
EVQLLESGGGLVQPGGSLRLSCAASGFTFSNYGVSWVRQAPGKGLEWVGYINRSREYTYYADSVKGRFTISRDNSKNTLYLQMNSLRAEDTAVYYCARSYGGGFDYWGQGTLVTVSS

SEQ ID NO: 2157 - protein, 119 aa, synthetic construct
EVQLLESGGGLVQPGGSLRLSCAASGFTFSRYAMNWVRQAPGKGLEWVSEISPSGKKKYYADSVKGRFTISRDNSKNTLYLQMNSLRAEDTAVYYCAKSSFDKYNFDYWGQGTLVTVSS

SEQ ID NO: 2158 - protein, 119 aa, synthetic construct
EVQLLESGGGLVQPGGSLRLSCAASGFTFSRYFMGWVRQAPGKGLEWVSEISPSGKKKYYAESVKGRFTISRDNSKNTLYLQMNSLRAEDTAVYYCAKSSFDKYNFDYWGQGTLVTVSS

SEQ ID NO: 2159 - protein, 117 aa, synthetic construct
EVQLLESGGGLVQPGGSLRLSCAASGFTFHKYGMAWVRQAPGKGLEWVSTISGGGGYTYYPDSVKGRFTISRDNSKNTLYLQMNSLRAEDTAVYYCARDTYLHFDYWGQGTLVTVSS

SEQ ID NO: 2160 - protein, 117 aa, synthetic construct
EVQLLESGGGLVQPGGSLRLSCAASGFTFSKYGVSWVRQAPGKGLEWVCYINSGSGYTYYADSVKGRFTISRDNSKNTLYLQMNSLRAEDTAVYYCARASYVHFDYWGQGTLVTVSS

SEQ ID NO: 2161 - protein, 115 aa, synthetic construct
EVQLLESGGGLVQPGGSLRLSCAASGFTFSSYFMSWVRQAPGKGLECVGVIWGGGGTYYADSVKGRFTISRDNSKNTLYLQMNSLRAEDTAVYYCAKGGTSFDYWGQGTLVTVSS

SEQ ID NO: 2162 - protein, 115 aa, synthetic construct
EVQLLESGGGLVQPGGSLRLSCAASGFTFSSYLMSWIRQAPGKGLEWVGVIWGGGGTYYADSVKGRFTISRDNSKNTLYLQMNSLRAEDTAVYYCAKGGTSFDYWGQGTLVTVSS

SEQ ID NO: 2163 - protein, 119 aa, synthetic construct
EVQLLESGGGLVQPGGSLRLSCAASGFTFSRYVMNWVRQAPGKGLEWVSEISPSGKKKYYADSVKGRFTISRDNSKNTLYLQMNSLRAEDTAVYYCAKSSFDKYNFDYWGQGTLVTVSS

SEQ ID NO: 2164 - protein, 117 aa, synthetic construct; identical to SEQ ID NO: 2141

SEQ ID NO: 2165 - protein, 118 aa, synthetic construct
EVQLLESGGGLVQPGGSLRLSCAASGFTFEDETMSWVRQAPGKGLEWVSAISGSGGGTSYADSVKGRFTISRDNSKNTLYLQMNSLRAEDTAVYYCARDVIAGPFDYWGQGTLVTVSS

SEQ ID NO: 2166 - protein, 116 aa, synthetic construct
EVQLLESGGGLVQPGGSLRLSCAASGFTFSNYGVSWVRQAPGKGLEWVSWISPHGALTYYADSVKGRFTISRDNSKNTLYLQMNSLKAEDTAVYYCAKGRRRFDYWGQGTLVTVSS

SEQ ID NO: 2167 - protein, 116 aa, synthetic construct
EVQLLESGGGLVQPGGSLRLSCAASGFTFSNYGVSWVRQAPGKGLEWVSSIDWHGWVTYYADSVKGRFTISRDNSKNTLYLQMNSLRAEDTAVYYCVKNALRFDYWGQGTLVTVSS

SEQ ID NO: 2168 - protein, 117 aa, synthetic construct
EVQLLESGGGLVQPGGSLRLSCAASGFTFSNYGVSWVRQAHGKGLEWVVYINPSRGYTYYADSVKGRFSISRDNSKNTLYLQMNSLRAEDTAVYYCARSYGGGFDYWGQGTLVTVSS

SEQ ID NO: 2169 - protein, 116 aa, synthetic construct; identical to SEQ ID NO: 2166

SEQ ID NO: 2170 - protein, 117 aa, synthetic construct
EVQLLESGGGLVQPGGSLRLSCAASGFTFNAYPMTWVRQAPGKGLEWVSAITGSGGSTYYADSVKGRFTISRDNSKNTLYLQMNSLRAEDTAVYYCARVWRNHLDYWGQGTLVTVSS

SEQ ID NO: 2171 - protein, 124 aa, synthetic construct
EVQLLESGGGLVQPGGSLRLSCAASGFTFEHNDMHWVRQAPGKGLEWVSGISPSGGITTYADSVKGRFTISRDNSKNTLYLQMNSLRAEDTAVYYCAKQAPGEKWLARGRLDYWGQGTLVTVSS

SEQ ID NO: 2172 - protein, 119 aa, synthetic construct
EVQLLESGGGLVQPGGSLRLSCAASDLHSRSYVMGWVRQAPGKGLEWVSEISRSGKKKYYADSVKGRFTISRDNSKNTLYLQMNSLRAEDTAVYYCAKSSFGEYNFDYWGQGTLVTVSS

SEQ ID NO: 2173 - protein, 117 aa, synthetic construct
EVQLLESGGGLVQPGGSLRLSCAASGFTFDKYDMAWVRQAPGKGLEWVSTICSGGDYTYYPDSVKGRFTISRDNSKNTLYLQMNSLRAEDTAVYYCARDTYIHFDYWGQGTLVTVSS

SEQ ID NO: 2174 - protein, 118 aa, synthetic construct
EVQLLESGGGLVQPGGSLRLSCAASGFTFNKYPMMWVRQAPGKGLEWVSTIGPSGTSTYYADSVKGRFTISRDNSKNTLYLQMNSLRAEDTAVYYCARRSYFRRFDYWGQGTLVTVSS

SEQ ID NO: 2175 - protein, 119 aa, synthetic construct; identical to SEQ ID NO: 2157

SEQ ID NO: 2176 - protein, 120 aa, synthetic construct
EVQLLESGGGLVQPGGSLRLSCAASGFTFNADPMSWVRQAPGKGLEWVSAITGSGGSTYYADSVKGRFTISRDNSKNTLYLQMNSLRAEDTAVYYCARDGSYSSSWYGYWGQGTLVTVSS

SEQ ID NO: 2177 - protein, 117 aa, synthetic construct
EVQLLESGGGLVQPGGSLRLSCAASGFTFEVYTMAWVRQAPGKGLEWVSSIHPKGYPTRYADSVKGRFTISRDNSKNTLYLQMNSLRAEDTAVYYCAKGWFGNFDYWGQGTLVTVSS

SEQ ID NO: 2178 - protein, 117 aa, synthetic construct
EVQLLESGGGLVQPGGSLRLSCAASGFTFHKYGMTWVRQAPGKGLEWVSSISSGGGYTYYPDSVKGRFTISRDNSKNTLYLQMNSLRAEDTAVYYCARDTYLHFDYWGQGTLVTVSS

SEQ ID NO: 2179 - protein, 116 aa, synthetic construct
EVQLLESGGGLVQPGGSLRLSCAASGFTFNKYPMMWVRQAPGKGLEWVSGITRSGSTNYRDSVKGRFTISRDNSKNTLYLQMNSLRAEDTAVYYCAKKLSNGFDYWGQGTLVTVSS

SEQ ID NO: 2180 - protein, 119 aa, synthetic construct
EVQLLESGGGLVQPGGSLRLSCAASASSVSRYVMGCVGQARGKGLKWVSEISRIGKKKCYADSVKGRFAISRDNCKNTLYLQMNSMRAEDTAVYYCEKSSFDKYNFDYWGQGTLVTVSS

SEQ ID NO: 2181 - protein, 121 aa, synthetic construct
EVQLLESGGGLVQPGGSLRLSCAASGFTFPVYNMAWVRQAPGKGLEWVSGIYPSGGSTVYADSVKGRFTISRDNSKNTLYLQMNSLRAEDTAVYYCARHRAGSSGWYSDYWGQGTLVTVSS

SEQ ID NO: 2182 - protein, 115 aa, synthetic construct
EVQLLESGGGLVQPGGSLRLSCAASGFTFSSYFMSWVRQAPGKGLEWVGVIWGGGGTYYADSVKGRFTIYRDNSKNTLYLQMNSLRAEDTAVYYCAKGGTSFDYWGQGTLVTVSS

SEQ ID NO: 2183 - protein, 119 aa, synthetic construct
EVQLLESGGGLVQPGGSLRLSCAASGFTFSRYFMGWVRQAPGKGLEWVSEISPSGKKKYYADSVKGRFTISRDNSKNTLYLQMNSLRAEDTAVYYCAKSSFDKYNFHYWGQGTLVTVSS

SEQ ID NO: 2184 - protein, 116 aa, synthetic construct
EVQLLESGGGLVQPGGSLRLSCAASGFTFEPVIMGWVRQAPGKGLEWVSSISPNGWDTYYADSVKGRFTISRDNSKNTLYLQMNSLRAEDTAVYYCATETSPNDYWGQGTLVTVSS

SEQ ID NO: 2185 - protein, 117 aa, synthetic construct
EVQLLESGGGLVQPGGSLRLSCAASGFTFHKYGMAWVRQAPGKGLEWVSTISSGGGYTYYPDSVKGRFTISRDNSKNTLYLQMNSLRAEDTAVYHCARDTYLHFDYWGQGTLVTVSS

SEQ ID NO: 2186 - protein, 116 aa, synthetic construct; identical to SEQ ID NO: 2184

SEQ ID NO: 2187 - protein, 117 aa, synthetic construct; identical to SEQ ID NO: 2151

SEQ ID NO: 2188 - protein, 117 aa, synthetic construct; identical to SEQ ID NO: 2151

SEQ ID NO: 2189 - protein, 117 aa, synthetic construct; identical to SEQ ID NO: 2141

SEQ ID NO: 2190 - protein, 107 aa, synthetic construct
DIQMTQSPSSLSASVGDRVTITCRASQTIERRLNWYQQKPGKAPKLLIYDASSLHTGVPSRFSGSGSGTDFTLTISSLQPEDFATYYCQQSYIIPPTFGQGTKVEIK

SEQ ID NO: 2191 - protein, 107 aa, synthetic construct
DIQMTQSPSSLSASVGDRVTITCRASHGVRTSLAWYQQKPGKAPKLLIYGKNNRPTGVPSRFSGSGSGTDFTLTISSLQPEDFATYYCQQSLAPPYTFGQGTKVEIK

SEQ ID NO: 2192 - protein, 107 aa, synthetic construct
DIQMTQSPSSLSASVGDRVTITCRATQAIERRLKWYQQKPGKAPKLLIYDNSSRQTGVPSRFSGSGSGTDFTLTISSLQPEDFATYYCQQSYIIPYTFGQGTKVEIK

SEQ ID NO: 2193 - protein, 107 aa, synthetic construct
DIQMTQSPSSLSASVGDRVTITCSASQDINKYLNWYQQKPGKAPKLLIYHTSRLQSGVPSRFSGSGSGTDFTLTISSLQPEDFATYYCQQYTYFPATFGQGTNVEIK

SEQ ID NO: 2194 - protein, 107 aa, synthetic construct; identical to SEQ ID NO: 1599

SEQ ID NO: 2195 - protein, 107 aa, synthetic construct
DIQMTQSPSSLSASVGDRVTITCSASHDINEYLNWYQQKPGKAPKLLIYHTSRLQSGVPSRFSGSESVTDFTLTISSLQPEDFATYYCQQFAYFPATFGQGTKVEIK

SEQ ID NO: 2196 - protein, 107 aa, synthetic construct
DIQMTPSPSSLSASVGDKITITCRPAHNIGNFLNWYQQKPRKAPKLLIYKTTWLHSSVPSSISGGGSATDYTLTIISLQPADYATYYCRHRSSYLPTFGQGTKVEIK

SEQ ID NO: 2197 - protein, 107 aa, synthetic construct
DIQMTQSPSSLSASVGDRVTITCRASQNIRSYLNWYQQKPGKAPKLLIYGKNIRPSGVPSRFSGSGSGTDFTLTISSLQPEDFATYYCQQYASVPVTFGQGTKVEIK

SEQ ID NO: 2198 - protein, 110 aa, synthetic construct
DIQMTQYPSSLSASVGDRVTIICSGNKLGDKYASWFQQKPGKARKLLIYRISWLQSGVPARFSGSGSGTDFTVTISSMHREDFATYYCVARPLRGNPHVLFGQGTKVEIK

SEQ ID NO: 2199 - protein, 107 aa, synthetic construct; identical to SEQ ID NO: 1599

SEQ ID NO: 2200 - protein, 107 aa, synthetic construct
DIQMTQSPSSLSASVGDRVTITCRASQGVRTSLAWYQQKPGKAPKLLIYAINNRPSGVPSRFSGSGSGTDFTLTISSLQPEDFATYYCQQSYSAPYTFGQGTKVRSK

SEQ ID NO: 2201 - protein, 103 aa, synthetic construct
DIQMTQSPSSLSASVGDRVTITCSASQDIRRYLNWYQQKPGKAPKLLIYHTSTLQSGVPSRFSGSGSGTDFTLTISSLQPDDFASYYCQQYRLFGQGTKVEIK

SEQ ID NO: 2202 - protein, 104 aa, synthetic construct
DIQMTQSPSSLSASVGDRVTITCSASQDINKYLNWYQQKPGKAPKLLIYHTSRLQSGVPSRFSGSGSGTDFTLTISSLQPEDFATYYCQQYTYFFGQGTKVEIK

SEQ ID NO: 2203 - protein, 107 aa, synthetic construct; identical to SEQ ID NO: 2197

SEQ ID NO: 2204 - protein, 107 aa, synthetic construct
DIQMTQSPSSLSASVGDRVTITCSAYQDINKYLNWYQQKPGKAPKLLIYHKSRLQSGVPSRFSGSGSGTDFTLTISSLQPEDFATYYCQQFAYFPATFGQGTKVEIK

SEQ ID NO: 2205 - protein, 107 aa, synthetic construct
DIQMTQSPSSLSASVGDRVTITCRASQTIERRLNWYQQKPGKAPKLLIYDTSSRHTGVPSRFSGSGSGTDFTLTISSLQPEDFATYYCQQSYIIPPTFGQGTKVEIK

SEQ ID NO: 2206 - protein, 107 aa, synthetic construct
DIQMTQSPSSLSASVGDRVTITCRASQDIGNFLNWYQQKPGKAPKLLIYRTSWLQSGVPSRFSGSGSGTDFTLTISSLQPEDFATYYCQQRSSYPPTFGQGTNVEIK

SEQ ID NO: 2207 - protein, 107 aa, synthetic construct
DIQMTQSPSSLSASVGDRVTITCRASQSISSYVNWYQQKPGKAPKLLIYRASTLASGVPSRFSGSGSGTDFTLTISSLQPEDFATYYCQQFAYFPATFGQGTKVEIK

SEQ ID NO: 2208 - protein, 107 aa, synthetic construct
DIQMTQSPSSLSASVGDRVTITCRASQVVSTSLSWYQQKPGKAPKLLIYANNNRASGVPSRFSGSGSGTDFTLTISSLQPEDFATYYCQQSYTAPYTFGQGTKVEIK

SEQ ID NO: 2209 - protein, 107 aa, synthetic construct
DIQMTQSPSSLSASVGDRVTITCRATQTIETSLKWYQQKPGKAPKLLIYDKNSLQTGVPSRFSGSGSGTDFTLTISSLQPEDFATYYCQQSYSTPHTFGQGTKVEIK

SEQ ID NO: 2210 - protein, 107 aa, synthetic construct; identical to SEQ ID NO: 2197

SEQ ID NO: 2211 - protein, 107 aa, synthetic construct; identical to SEQ ID NO: 2197

SEQ ID NO: 2212 - protein, 107 aa, synthetic construct
DIQMTQSPSSLSASVGDRVTITCCASQDINKFLNWYQQKPGKAPKLLIYHTSRLQSGVPSRFSGSGSGTDFTLTISSLQPEDFATYYCQQFASFPATFGQGTKVEIK

SEQ ID NO: 2213 - protein, 107 aa, synthetic construct
DIQMTQSPSSLSASVGDRVTITCRASQTIERRLNWYQQKPGKAPKLLIYDASSLHTGVSSRFSGSGSGTYFTLTISSLQAEDFATYYCQQSYIIPPTFGQGTKVEIK

SEQ ID NO: 2214 - protein, 109 aa, synthetic construct
DIQMTQSPSSLSASVGDRVTITCAASGFNIKDTYIHWYQQKPGKAPKLLIYGTTSLESGVPSRFSGSGSGTDFTLTISSLQPEDFATYYCQQSYSTPRTFGQGTKVEIK

SEQ ID NO: 2215 - protein, 107 aa, synthetic construct
DIQMTQSPSSLSASVGDRVTITCRASQTISSYLNWYQQKPGKAPKLLIYENNNRPSGVPSRFSGSGSGTDFTLTISSLQPEDFATYYCQQSYIIPPTFGQGTKVEIK

SEQ ID NO: 2216 - protein, 107 aa, synthetic construct
DIQMTQSPSSLSASVGDRVTITCSASQDINKYLNWYQQKPGKAPKLLIYHTSRLQSGVPSRFSGSGSGTDFTLTISSLQPEDFATYYCQQVVWRPFTFGQGTKVEIK

SEQ ID NO: 2217 - protein, 107 aa, synthetic construct; identical to SEQ ID NO: 2190

SEQ ID NO: 2218 - protein, 107 aa, synthetic construct
DIQMTQSPSSLSASVGDRVTITCRASQTISSYLNWYQQKPGKAPKLLIYENNNRPSGVPSRFSGSGSGTDFTLTISSLQPEDFATYYCQQSYIIPPTFGQGTNVEIK

SEQ ID NO: 2219 - protein, 107 aa, synthetic construct
DIQMTQSPSSLSASVGDRVTITCSGDKLGHTYTSWYQQKPGKAPKLLIYRASTLASGVPSRFSGSGSGTDFTLTISSLQPEDFATYYCQQGYTLPWTFGQGTKVEIK

SEQ ID NO: 2220 - protein, 102 aa, synthetic construct
DIQMTQSPSSLSASVGDRVTITCRANQNIGNFLNWYQQKPGKAPKLLIYHTSRLQDWIPSRFSASVSGTDFTLTISSLQSEDCATYYCQQLAFGQGTKVEIK

SEQ ID NO: 2221 - protein, 107 aa, synthetic construct; identical to SEQ ID NO: 1641

SEQ ID NO: 2222 - protein, 107 aa, synthetic construct
DIQMTQSPSSLSASVGDRVTITCRASHGVRTSLAWYQQKPGKAPKLLIYGKNNRPTGVPSRFSGSGSGTDFTLTISSLQPEDFATYYCQQSYSAPYTFGQGTKVEIK

SEQ ID NO: 2223 - protein, 107 aa, synthetic construct
DIQMTQSPSSLSASVGDRVTITCRATQSIRSFLNWYQQKPGKAPKLLIYKVSNRFSGVPSRFSGSGSGTDFTLTISSLQPEDFATYYCQQYDAYPPTLGQGTKVEIK

SEQ ID NO: 2224 - protein, 107 aa, synthetic construct
DIQMTQSPSSLSASVGDRVTITCRASQDIGNFLNWYQQKPGKAPKLLIYRTSWLQSGVPSRFSGSGSGTDFTLTISSLQPEDFATYYCQQRSSYSATFGQGTKVEIK

SEQ ID NO: 2225 - protein, 110 aa, synthetic construct
DIQMTQSPSSLSASVGDRVTITCSGNKLGDKYASWYQQKPGKAPKLLIYRTTWLQSGVPSRFSGSGSGTDFTLTISSLQPEDFATYYCVARAVRGNPLVLFGQGTKVEIK

SEQ ID NO: 2226 - protein, 107 aa, synthetic construct
DIQMTQSPSSLSASVGDRVTITCRASQGVRTSLAWYQQKPGKAPKLLIYGKNIRPIGVPSRFSGSGSGTDFTLTISSLQPEDFATYYCGQSYRYRLTFGQGTKVEIK

SEQ ID NO: 2227 - protein, 107 aa, synthetic construct; identical to SEQ ID NO: 1599

SEQ ID NO: 2228 - protein, 107 aa, synthetic construct
DIQMTQSPSSLSASVGDRVTITCRASQRISSFLNWYQQKPGKAPKLLIYGKNIRPSGVPSRFSGSGSGTDFTLTISSLQPEDFATYYCQQSYELPLTFGQGTKVEIK

SEQ ID NO: 2229 - protein, 107 aa, synthetic construct
DIQMTQSPSSLSASVGDRVTITCCASQDINKYLNWYQQKPGKAPKLLIYHTSRLQSGVPSRFSGSGSGTDFTLTISSLQPEDFATYYCQQFAYFPATFGQGTKVEIK

SEQ ID NO: 2230 - protein, 107 aa, synthetic construct
DIQMTQSPSSLSASVGDRVTITCRASQSVDRYFNWYQQKPGKAPKLLIYAASSLYSGVPSRFSGSGSGTDFTLTISSLQPEDFATYYCQQSYRTPLTFGQGTNVEIK

SEQ ID NO: 2231 - protein, 107 aa, synthetic construct; identical to SEQ ID NO: 2197

SEQ ID NO: 2232 - protein, 107 aa, synthetic construct
DIHMTHSPSSLSASVGDRVTITCSASQDINKYLNWYQQKPGKAPKLLIYHTSTLQSPFPSRFSGSGSGTDFTLTISSLQPEDFATYYCQQFAYFPATFGQGTKVEIK

SEQ ID NO: 2233 - protein, 111 aa, synthetic construct
DIQMTQSPSSLSASVGDRVTITCRSSQSLVHSTGNTYLHWYQQKPGKAPKLLIYQMSHLASGVPSRFSGSGSGTDFTLTISSLQPEDFATYYCQQSYSAPTFGQGTKVEIK

SEQ ID NO: 2234 - protein, 107 aa, synthetic construct; identical to SEQ ID NO: 1599

SEQ ID NO: 2235 - protein, 111 aa, synthetic construct
DIQMTQSPSSLSASVGDRVTITCRSSQSLVHSTGNTYLHWYQQKPGKAPKLLIYQMSHLASGVPSRFSGSGSGTDFTLTISSLQPEDFATYYCQQSYSAPTFGQGTNVEIK

SEQ ID NO: 2236 - protein, 107 aa, synthetic construct
DIQMTQSPSSLSASVGDRVTITCRASQGVRTSLAWYQQKPGKAPKLLIYAKNNRPSGVPSRFSGSGSGTDFTLTISSLQPEDFATYYCQQSYSVPYTFGQGTKVEIK

SEQ ID NO: 2237 - protein, 107 aa, synthetic construct
EIQMTQSPSSLSASVGDRVTITCRASQGVRTSLAWYQQKPRKAPKLLIYALNNRPSGVPSRFSGSGSGTDFTLTISSLQPEDFATYYCQQSYSAPYTFGQGTKVEIK

SEQ ID NO: 2238 - protein, 107 aa, synthetic construct
DIQMTQSPSSLSASVGDRVTITCGASQTIERRLNWYQQKPGKAPKLLIYDASSLHTGVPSRISGSGSGTDFTLTISSLQPEHFATYYCQQSYIIPPTFGQGTKVEIK

SEQ ID NO: 2239 - protein, 7 aa, synthetic construct
GGFSLSG

SEQ ID NO: 2240 - protein, 7 aa, synthetic construct
GGYTFTN

SEQ ID NO: 2241 - protein, 7 aa, synthetic construct
GTSKVGV

SEQ ID NO: 2242 - protein, 8 aa, synthetic construct
GGGFTIKD

SEQ ID NO: 2243 - protein, 7 aa, synthetic construct
GDYTFTS

SEQ ID NO: 2244 - protein, 7 aa, synthetic construct
GGFSLTD

SEQ ID NO: 2245 - protein, 7 aa, synthetic construct
GGFSLTD

SEQ ID NO: 2246 - protein, 7 aa, synthetic construct
GGFSLTD

SEQ ID NO: 2247 - protein, 7 aa, synthetic construct
GGYAISG

SEQ ID NO: 2248 - protein, 7 aa, synthetic construct
GTSKVGV

SEQ ID NO: 2249 - protein, 7 aa, synthetic construct
GGFTFTN

SEQ ID NO: 2250 - protein, 7 aa, synthetic construct
GGYTFTN

SEQ ID NO: 2251 - protein, 7 aa, synthetic construct
GTSGIGV

SEQ ID NO: 2252 - protein, 7 aa, synthetic construct
GGYTFTK

SEQ ID NO: 2253 - protein, 7 aa, synthetic construct
GGFTFTN

SEQ ID NO: 2254 - protein, 7 aa, synthetic construct
GGYTFTN

SEQ ID NO: 2255 - protein, 7 aa, synthetic construct
GGFSLTD

SEQ ID NO: 2256 - protein, 7 aa, synthetic construct
GDFNIKD

SEQ ID NO: 2257 - protein, 7 aa, synthetic construct
GTSGYYW

SEQ ID NO: 2258 - protein, 7 aa, synthetic construct
GGYSFTG

SEQ ID NO: 2259 - protein, 7 aa, synthetic construct
GTSGIGV

SEQ ID NO: 2260 - protein, 7 aa, synthetic construct
GTSGYYW

SEQ ID NO: 2261 - protein, 7 aa, synthetic construct
GGFTFLG

SEQ ID NO: 2262 - protein, 7 aa, synthetic construct
GGGPLRN

SEQ ID NO: 2263 - protein, 7 aa, synthetic construct
GDFNIKD

SEQ ID NO: 2264 - protein, 7 aa, synthetic construct
GGYTFTS

SEQ ID NO: 2265 - protein, 7 aa, synthetic construct
GGFSLTD

SEQ ID NO: 2266 - protein, 7 aa, synthetic construct
GTTGEGV

SEQ ID NO: 2267 - protein, 7 aa, synthetic construct
GGYISTD

SEQ ID NO: 2268 - protein, 7 aa, synthetic construct
GGYNIKD

SEQ ID NO: 2269 - protein, 7 aa, synthetic construct
GGFSLTD

SEQ ID NO: 2270 - protein, 7 aa, synthetic construct
GGYISTD

SEQ ID NO: 2271 - protein, 7 aa, synthetic construct
GGYIFTE

SEQ ID NO: 2272 - protein, 7 aa, synthetic construct
GDFNIKD

SEQ ID NO: 2273 - protein, 7 aa, synthetic construct
GGFSLTD

SEQ ID NO: 2274 - protein, 7 aa, synthetic construct
GGFTFSR

SEQ ID NO: 2275 - protein, 7 aa, synthetic construct
GFTFRNY

SEQ ID NO: 2276 - protein, 7 aa, synthetic construct
GLFFLTD

SEQ ID NO: 2277 - protein, 7 aa, synthetic construct
GFTFGTI

SEQ ID NO: 2278 - protein, 7 aa, synthetic construct
GFTFSRY

SEQ ID NO: 2279 - protein, 7 aa, synthetic construct
GFTFSNY

SEQ ID NO: 2280 - protein, 7 aa, synthetic construct
GFTFTNY

SEQ ID NO: 2281 - protein, 7 aa, synthetic construct
GFTFSSY

SEQ ID NO: 2282 - protein, 7 aa, synthetic construct
GFTFSSY

SEQ ID NO: 2283 - protein, 7 aa, synthetic construct
GFTFSRY

SEQ ID NO: 2284 - protein, 7 aa, synthetic construct
GFTFDLY

SEQ ID NO: 2285 - protein, 7 aa, synthetic construct
GFTFSPY

SEQ ID NO: 2286 - protein, 7 aa, synthetic construct
GFTSNNF

SEQ ID NO: 2287 - protein, 7 aa, synthetic construct
GFTFSRY

SEQ ID NO: 2288 - protein, 6 aa, synthetic construct
YPGGGY

SEQ ID NO: 2289 - protein, 6 aa, synthetic construct
YPSGGY

SEQ ID NO: 2290 - protein, 8 aa, synthetic construct
RNKGNKTY

SEQ ID NO: 2291 - protein, 6 aa, synthetic construct
LPGSGS

SEQ ID NO: 2292 - protein, 8 aa, synthetic construct
RSKGFNFA

SEQ ID NO: 2293 - protein, 6 aa, synthetic construct
YPSGGY

SEQ ID NO: 2294 - protein, 6 aa, synthetic construct
YPSGGY

SEQ ID NO: 2295 - protein, 6 aa, synthetic construct
YPSGGY

SEQ ID NO: 2296 - protein, 6 aa, synthetic construct
TSGSGT

SEQ ID NO: 2297 - protein, 6 aa, synthetic construct
ATGGHT

SEQ ID NO: 2298 - protein, 6 aa, synthetic construct
LPGSGS

SEQ ID NO: 2299 - protein, 6 aa, synthetic construct
NPGSGG

SEQ ID NO: 2300 - protein, 7 aa, synthetic construct
KTVTGAV

SEQ ID NO: 2301 - protein, 6 aa, synthetic construct
YPGTGS

SEQ ID NO: 2302 - protein, 6 aa, synthetic construct
TPGSSY

SEQ ID NO: 2303 - protein, 8 aa, synthetic construct
KNIPNNYA

SEQ ID NO: 2304 - protein, 6 aa, synthetic construct
SSGGSY

SEQ ID NO: 2305 - protein, 6 aa, synthetic construct
KPLWGA

SEQ ID NO: 2306 - protein, 6 aa, synthetic construct
STYSGY

SEQ ID NO: 2307 - protein, 6 aa, synthetic construct
LPGSDN

SEQ ID NO: 2308 - protein, 6 aa, synthetic construct
LPGSDN

SEQ ID NO: 2309 - protein, 6 aa, synthetic construct
LPGSDN

SEQ ID NO: 2310 - protein, 6 aa, synthetic construct
ATGGHT

SEQ ID NO: 2311 - protein, 6 aa, synthetic construct
YPGNRD

SEQ ID NO: 2312 - protein, 6 aa, synthetic construct
KPLWGA

SEQ ID NO: 2313 - protein, 6 aa, synthetic construct
YPGGGY

SEQ ID NO: 2314 - protein, 6 aa, synthetic construct
SSYSGY

SEQ ID NO: 2315 - protein, 8 aa, synthetic construct
RNKPKGYT

SEQ ID NO: 2316 - protein, 6 aa, synthetic construct
STGGYN

SEQ ID NO: 2317 - protein, 6 aa, synthetic construct
KPLWGA

SEQ ID NO: 2318 - protein, 6 aa, synthetic construct
YPSGGY

SEQ ID NO: 2319 - protein, 6 aa, synthetic construct
STYSGY

SEQ ID NO: 2320 - protein, 6 aa, synthetic construct
YPGSSY

SEQ ID NO: 2321 - protein, 6 aa, synthetic construct
KPLWGA

SEQ ID NO: 2322 - protein, 6 aa, synthetic construct
YPGSGI

SEQ ID NO: 2323 - protein, 6 aa, synthetic construct
IPKYGT

SEQ ID NO: 2324 - protein, 6 aa, synthetic construct
SPSGNK

SEQ ID NO: 2325 - protein, 6 aa, synthetic construct
YPSGGY

SEQ ID NO: 2326 - protein, 5 aa, synthetic construct
WGGGG

SEQ ID NO: 2327 - protein, 6 aa, synthetic construct
SPSGKK

SEQ ID NO: 2328 - protein, 6 aa, synthetic construct
NPSRGY

SEQ ID NO: 2329 - protein, 6 aa, synthetic construct
NPSRGY

SEQ ID NO: 2330 - protein, 5 aa, synthetic construct
WGGGG

SEQ ID NO: 2331 - protein, 6 aa, synthetic construct
SPSGKK

SEQ ID NO: 2332 - protein, 6 aa, synthetic construct
SPSGKK

SEQ ID NO: 2333 - protein, 6 aa, synthetic construct
SPSGKK

SEQ ID NO: 2334 - protein, 6 aa, synthetic construct
SCTSFT

SEQ ID NO: 2335 - protein, 6 aa, synthetic construct
SPSGGW

SEQ ID NO: 2336 - protein, 6 aa, synthetic construct
SPSGKK

SEQ ID NO: 2337 - protein, 11 aa, synthetic construct
DQGLNYGSLFD

SEQ ID NO: 2338 - protein, 11 aa, synthetic construct
DQGLNYGSLFD

SEQ ID NO: 2339 - protein, 7 aa, synthetic construct
DTAAYFD

SEQ ID NO: 2340 - protein, 9 aa, synthetic construct
FAGGWGAYD

SEQ ID NO: 2341 - protein, 7 aa, synthetic construct
FDYGNED

SEQ ID NO: 2342 - protein, 9 aa, synthetic construct
GDAYSRYFD

SEQ ID NO: 2343 - protein, 9 aa, synthetic construct
GDAYSRYFD

SEQ ID NO: 2344 - protein, 9 aa, synthetic construct
GDAYSRYFD

SEQ ID NO: 2345 - protein, 9 aa, synthetic construct
GDYYGRKSA

SEQ ID NO: 2346 - protein, 9 aa, synthetic construct
GNYDRAWFA

SEQ ID NO: 2347 - protein, 6 aa, synthetic construct
GNYLPA

SEQ ID NO: 2348 - protein, 6 aa, synthetic construct
GNYLPA

SEQ ID NO: 2349 - protein, 8 aa, synthetic construct
GNYPYFDV

SEQ ID NO: 2350 - protein, 7 aa, synthetic construct
GVFGFFD

SEQ ID NO: 2351 - protein, 6 aa, synthetic construct
GYGHLD

SEQ ID NO: 2352 - protein, 8 aa, synthetic construct
LGYRSYFD

SEQ ID NO: 2353 - protein, 14 aa, synthetic construct
NYYNLWTGYYPLAY

SEQ ID NO: 2354 - protein, 8 aa, synthetic construct
SGGPYFFD

SEQ ID NO: 2355 - protein, 8 aa, synthetic construct
SGGPYFFD

SEQ ID NO: 2356 - protein, 11 aa, synthetic construct
SVYYGGSYYFD

SEQ ID NO: 2357 - protein, 12 aa, synthetic construct
WFGDLLSLKGVE

SEQ ID NO: 2358 - protein, 12 aa, synthetic construct
WFGDLLSLKGVE

SEQ ID NO: 2359 - protein, 8 aa, synthetic construct
WTYGSSFD

SEQ ID NO: 2360 - protein, 7 aa, synthetic construct
GVFGFFD

SEQ ID NO: 2361 - protein, 10 aa, synthetic construct
YDYYGGSYFD

SEQ ID NO: 2362 - protein, 9 aa, synthetic construct
GNYDRAWFA

SEQ ID NO: 2363 - protein, 9 aa, synthetic construct
SPYYYGNWD

SEQ ID NO: 2364 - protein, 12 aa, synthetic construct
LYYYGTSYGVLD

SEQ ID NO: 2365 - protein, 9 aa, synthetic construct
GDYVNWYFD

SEQ ID NO: 2366 - protein, 10 aa, synthetic construct
GEDNFGSLSD

SEQ ID NO: 2367 - protein, 9 aa, synthetic construct
GDAYSRYFY

SEQ ID NO: 2368 - protein, 8 aa, synthetic construct
SGGPYFFD

SEQ ID NO: 2369 - protein, 11 aa, synthetic construct
DQGLNYGSLFD

SEQ ID NO: 2370 - protein, 10 aa, synthetic construct
GEDNFGSLSD

SEQ ID NO: 2371 - protein, 9 aa, synthetic construct
GDAYSRYFD

SEQ ID NO: 2372 - protein, 11 aa, synthetic construct
YSSSSPYAFDI

SEQ ID NO: 2373 - protein, 8 aa, synthetic construct
GFGLGFDY

SEQ ID NO: 2374 - protein, 9 aa, synthetic construct
GDAYSRYFD

SEQ ID NO: 2375 - protein, 13 aa, synthetic construct
AHGNPVSDLSFDY

SEQ ID NO: 2376 - protein, 10 aa, synthetic construct
SSFDKYNFDY

SEQ ID NO: 2377 - protein, 8 aa, synthetic construct
SYGGGFDY

SEQ ID NO: 2378 - protein, 8 aa, synthetic construct
SYRGGFDY

SEQ ID NO: 2379 - protein, 7 aa, synthetic construct
GGTSFDY

SEQ ID NO: 2380 - protein, 8 aa, synthetic construct
WSSRAFDY

SEQ ID NO: 2381 - protein, 10 aa, synthetic construct
SSFDKYNFHY

SEQ ID NO: 2382 - protein, 8 aa, synthetic construct
GWFGNFDY

SEQ ID NO: 2383 - protein, 10 aa, synthetic construct
VRPFWGTFDY

SEQ ID NO: 2384 - protein, 7 aa, synthetic construct
AFSTFDY

SEQ ID NO: 2385 - protein, 11 aa, synthetic construct
RASQRINTYLN

SEQ ID NO: 2386 - protein, 11 aa, synthetic construct
RAGQDISNYLN

SEQ ID NO: 2387 - protein, 11 aa, synthetic construct
QASQDISSYLN

SEQ ID NO: 2388 - protein, 11 aa, synthetic construct
KASQDIRKYLN

SEQ ID NO: 2389 - protein, 12 aa, synthetic construct
SVSSSISSSNLH

SEQ ID NO: 2390 - protein, 11 aa, synthetic construct
RASQSIGNDLH

SEQ ID NO: 2391 - protein, 11 aa, synthetic construct
RASQSIGNDLH

SEQ ID NO: 2392 - protein, 11 aa, synthetic construct
RASQSIGNDLH

SEQ ID NO: 2393 - protein, 12 aa, synthetic construct
RASHSVSSSYLG

SEQ ID NO: 2394 - protein, 11 aa, synthetic construct
SASQDISNYLN

SEQ ID NO: 2395 - protein, 12 aa, synthetic construct
RASQSVHSRYFA

SEQ ID NO: 2396 - protein, 12 aa, synthetic construct
SVSSSISSSNLH

SEQ ID NO: 2397 - protein, 11 aa, synthetic construct
RASQSVGGYLT

SEQ ID NO: 2398 - protein, 11 aa, synthetic construct
SASQGISNYLN

SEQ ID NO: 2399 - protein, 12 aa, synthetic construct
RSSHSIRSRRVA

SEQ ID NO: 2400 - protein, 11 aa, synthetic construct
RASQDISIRLN

SEQ ID NO: 2401 - protein, 12 aa, synthetic construct
RASQSVSSGSLA

SEQ ID NO: 2402 - protein, 11 aa, synthetic construct
RASQSVGRNLG

SEQ ID NO: 2403 - protein, 11 aa, synthetic construct
KASQNVGTAVA

SEQ ID NO: 2404 - protein, 11 aa, synthetic construct
KATEDIYNRLA

SEQ ID NO: 2405 - protein, 11 aa, synthetic construct
RASQNIGTSIH

SEQ ID NO: 2406 - protein, 11 aa, synthetic construct
KASQNVRNNIA

SEQ ID NO: 2407 - protein, 11 aa, synthetic construct
KASEDIHNRLA

SEQ ID NO: 2408 - protein, 11 aa, synthetic construct
RASQDIYNYLN

SEQ ID NO: 2409 - protein, 11 aa, synthetic construct
QASQSISSYLA

SEQ ID NO: 2410 - protein, 12 aa, synthetic construct
RASSSVSSTYLH

SEQ ID NO: 2411 - protein, 11 aa, synthetic construct
RASKTISKYLA

SEQ ID NO: 2412 - protein, 11 aa, synthetic construct
KASQDIRKYLN

SEQ ID NO: 2413 - protein, 11 aa, synthetic construct
KASQNVRTSVA

SEQ ID NO: 2414 - protein, 12 aa, synthetic construct
RASQSVSSNYLA

SEQ ID NO: 2415 - protein, 11 aa, synthetic construct
RASQSISNDLH

SEQ ID NO: 2416 - protein, 11 aa, synthetic construct
KASQDINKYIA

SEQ ID NO: 2417 - protein, 11 aa, synthetic construct
KASQDINKYIA

SEQ ID NO: 2418 - protein, 11 aa, synthetic construct
KASEDIYSRLA

SEQ ID NO: 2419 - protein, 11 aa, synthetic construct
RASQSIGNDLH

SEQ ID NO: 2420 - protein, 12 aa, synthetic construct
RASQNVHPRYFA

SEQ ID NO: 2421 - protein, 11 aa, synthetic construct
QGASLRNYYAS

SEQ ID NO: 2422 - protein, 11 aa, synthetic construct
RASQSIGNDLH

SEQ ID NO: 2423 - protein, 11 aa, synthetic construct
SGDKLGDKYTS

SEQ ID NO: 2424 - protein, 11 aa, synthetic construct
RASQDIGNFLN

SEQ ID NO: 2425 - protein, 11 aa, synthetic construct
RASQTIERRLN

SEQ ID NO: 2426 - protein, 11 aa, synthetic construct
TASQTIERRLN

SEQ ID NO: 2427 - protein, 11 aa, synthetic construct
RASQNIRSYLN

SEQ ID NO: 2428 - protein, 11 aa, synthetic construct
RASQSISSYLH

SEQ ID NO: 2429 - protein, 11 aa, synthetic construct
SASQDINKYLN

SEQ ID NO: 2430 - protein, 11 aa, synthetic construct
RASQGVRTSLA

SEQ ID NO: 2431 - protein, 11 aa, synthetic construct
RASHDVSCGVS

SEQ ID NO: 2432 - protein, 11 aa, synthetic construct
RATQSIRSFLN

SEQ ID NO: 2433 - protein, 11 aa, synthetic construct
SASQDINKYLN

SEQ ID NO: 2434 - protein, 7 aa, synthetic construct
LGSTRAS

SEQ ID NO: 2435 - protein, 7 aa, synthetic construct
RANRLVS

SEQ ID NO: 2436 - protein, 7 aa, synthetic construct
LVSKRDS

SEQ ID NO: 2437 - protein, 7 aa, synthetic construct
YASNRYS

SEQ ID NO: 2438 - protein, 7 aa, synthetic construct
LGSTRAS

SEQ ID NO: 2439 - protein, 7 aa, synthetic construct
SASSLYS

SEQ ID NO: 2440 - protein, 7 aa, synthetic construct
DATNLDS

SEQ ID NO: 2441 - protein, 7 aa, synthetic construct
DATKLDS

SEQ ID NO: 2442 - protein, 7 aa, synthetic construct
YTSTLHS

SEQ ID NO: 2443 - protein, 7 aa, synthetic construct
YTTTLAA

SEQ ID NO: 2444 - protein, 7 aa, synthetic construct
TVSNRFS

SEQ ID NO: 2445 - protein, 7 aa, synthetic construct
STSNLAT

SEQ ID NO: 2446 - protein, 7 aa, synthetic construct
AGSTLDS

SEQ ID NO: 2447 - protein, 7 aa, synthetic construct
YTNKLAT

SEQ ID NO: 2448 - protein, 7 aa, synthetic construct
STSTLAS

SEQ ID NO: 2449 - protein, 7 aa, synthetic construct
YTDRLQT

SEQ ID NO: 2450 - protein, 7 aa, synthetic construct
SASSLYS

SEQ ID NO: 2451 - protein, 7 aa, synthetic construct
YTSRLHT

SEQ ID NO: 2452 - protein, 7 aa, synthetic construct
GTSNLAS

SEQ ID NO: 2453 - protein, 7 aa, synthetic construct
TVSNRFS

SEQ ID NO: 2454 - protein, 7 aa, synthetic construct
YTNKLAT

SEQ ID NO: 2455 - protein, 7 aa, synthetic construct
YTSTLES

SEQ ID NO: 2456 - protein, 7 aa, synthetic construct
YTDRLQT

SEQ ID NO: 2457 - protein, 7 aa, synthetic construct
YTSSLRS

SEQ ID NO: 2458 - protein, 7 aa, synthetic construct
HGASNLQ

SEQ ID NO: 2459 - protein, 7 aa, synthetic construct
KVSNRFS

SEQ ID NO: 2460 - protein, 7 aa, synthetic construct
YTSRLQT

SEQ ID NO: 2461 - protein, 7 aa, synthetic construct
YASTLFT

SEQ ID NO: 2462 - protein, 7 aa, synthetic construct
SASNRYS

SEQ ID NO: 2463 - protein, 7 aa, synthetic construct
WAATRES

SEQ ID NO: 2464 - protein, 7 aa, synthetic construct
TASSLYS

SEQ ID NO: 2465 - protein, 7 aa, synthetic construct
YTSTLKS

SEQ ID NO: 2466 - protein, 7 aa, synthetic construct
WASTRHT

SEQ ID NO: 2467 - protein, 7 aa, synthetic construct
WASTRHI

SEQ ID NO: 2468 - protein, 7 aa, synthetic construct
TASNKGT

SEQ ID NO: 2469 - protein, 7 aa, synthetic construct
SASNRYS

SEQ ID NO: 2470 - protein, 7 aa, synthetic construct
GQNIRPS

SEQ ID NO: 2471 - protein, 7 aa, synthetic construct
SASSLYS

SEQ ID NO: 2472 - protein, 7 aa, synthetic construct
HTSRLQD

SEQ ID NO: 2473 - protein, 7 aa, synthetic construct
RTSWLQS

SEQ ID NO: 2474 - protein, 7 aa, synthetic construct
DASSLHT

SEQ ID NO: 2475 - protein, 7 aa, synthetic construct
DASSLHT

SEQ ID NO: 2476 - protein, 7 aa, synthetic construct
GKNIRPS

SEQ ID NO: 2477 - protein, 7 aa, synthetic construct
RTSWLQS

SEQ ID NO: 2478 - protein, 7 aa, synthetic construct
HTSRLQS

SEQ ID NO: 2479 - protein, 7 aa, synthetic construct
GKNIRPS

SEQ ID NO: 2480 - protein, 5 aa, synthetic construct
KKRPI

SEQ ID NO: 2481 - protein, 7 aa, synthetic construct
KVSNRFS

SEQ ID NO: 2482 - protein, 7 aa, synthetic construct
HTSRLQS

SEQ ID NO: 2483 - protein, 9 aa, synthetic construct
QNDYSNPLT

SEQ ID NO: 2484 - protein, 9 aa, synthetic construct
QQSYATLPT

SEQ ID NO: 2485 - protein, 9 aa, synthetic construct
QHFWGNPWT

SEQ ID NO: 2486 - protein, 9 aa, synthetic construct
QQGQTYPYT

SEQ ID NO: 2487 - protein, 9 aa, synthetic construct
QHSRELPWT

SEQ ID NO: 2488 - protein, 9 aa, synthetic construct
QNNYNYPLT

SEQ ID NO: 2489 - protein, 9 aa, synthetic construct
QNNYNYPLT

SEQ ID NO: 2490 - protein, 9 aa, synthetic construct
QNNYNYPLT

SEQ ID NO: 2491 - skipped

SEQ ID NO: 2492 - protein, 9 aa, synthetic construct
HQHYSTPFT

SEQ ID NO: 2493 - protein, 9 aa, synthetic construct
LQSDNLPYT

SEQ ID NO: 2494 - protein, 9 aa, synthetic construct
GQTYNHPYT

SEQ ID NO: 2495 - protein, 9 aa, synthetic construct
LQWSSFPYT

SEQ ID NO: 2496 - protein, 9 aa, synthetic construct
QQGNTLSYT

SEQ ID NO: 2497 - protein, 9 aa, synthetic construct
SQSTHVPPT

SEQ ID NO: 2498 - protein, 9 aa, synthetic construct
FQGSHSPWT

SEQ ID NO: 2499 - protein, 9 aa, synthetic construct
GQSYNYPFT

SEQ ID NO: 2500 - protein, 9 aa, synthetic construct
QQYDTLPLT

SEQ ID NO: 2501 - protein, 8 aa, synthetic construct
QKTLRTWT

SEQ ID NO: 2502 - protein, 9 aa, synthetic construct
QQGNTLPWT

SEQ ID NO: 2503 - protein, 9 aa, synthetic construct
QQRSTYPPT

SEQ ID NO: 2504 - protein, 9 aa, synthetic construct
QQRSTYPPT

SEQ ID NO: 2505 - protein, 10 aa, synthetic construct
HQYIQLHSFT

SEQ ID NO: 2506 - protein, 9 aa, synthetic construct
HQWSSYPWT

SEQ ID NO: 2507 - protein, 9 aa, synthetic construct
QQGNTLPPT

SEQ ID NO: 2508 - protein, 8 aa, synthetic construct
QQGQTYPT

SEQ ID NO: 2509 - protein, 9 aa, synthetic construct
QQYRYSPRT

SEQ ID NO: 2510 - protein, 9 aa, synthetic construct
QQHQNVPLT

SEQ ID NO: 2511 - protein, 9 aa, synthetic construct
QQGGALPFT

SEQ ID NO: 2512 - protein, 9 aa, synthetic construct
GQSYSSPLT

SEQ ID NO: 2513 - protein, 9 aa, synthetic construct
QNHYNYPLT

SEQ ID NO: 2514 - protein, 8 aa, synthetic construct
QQITDWPF

SEQ ID NO: 2515 - protein, 9 aa, synthetic construct
QQHYGTPLT

SEQ ID NO: 2516 - protein, 9 aa, synthetic construct
QQGNRWPFT

SEQ ID NO: 2517 - protein, 9 aa, synthetic construct
QNNYNYPLT

SEQ ID NO: 2518 - protein, 9 aa, synthetic construct
QQSNRWPLT

SEQ ID NO: 2519 - protein, 10 aa, synthetic construct
SSCDRSGHGV

SEQ ID NO: 2520 - protein, 9 aa, synthetic construct
QNNYNYPLT

SEQ ID NO: 2521 - protein, 9 aa, synthetic construct
QQSYNLPLT

SEQ ID NO: 2522 - protein, 9 aa, synthetic construct
QQRSSYPPT

SEQ ID NO: 2523 - protein, 9 aa, synthetic construct
QQSYIIPPT

SEQ ID NO: 2524 - protein, 6 aa, synthetic construct
QQSYIT

SEQ ID NO: 2525 - protein, 9 aa, synthetic construct
QQYASVPVT

SEQ ID NO: 2526 - protein, 9 aa, synthetic construct
QQYSGYPIT

SEQ ID NO: 2527 - protein, 9 aa, synthetic construct
QQIAYFPST

SEQ ID NO: 2528 - protein, 9 aa, synthetic construct
QQSYENPLT

SEQ ID NO: 2529 - protein, 13 aa, synthetic construct
QDSYYNGSGWCYA

SEQ ID NO: 2530 - protein, 9 aa, synthetic construct
QAWESSTVV

SEQ ID NO: 2531 - protein, 9 aa, synthetic construct
QQFAYFPAT

SEQ ID NO: 2532 - protein, 51 aa, synthetic construct
GGFSLSGYPGGGYDQGLNYGSLFDRASQRINTYLNLGSTRASQNDYSNPLT

SEQ ID NO: 2533 - protein, 51 aa, synthetic construct
GGYTFTNYPSGGYDQGLNYGSLFDRAGQDISNYLNRANRLVSQQSYATLPT

SEQ ID NO: 2534 - protein, 49 aa, synthetic construct
GTSKVGVRNKGNKTYDTAAYFDQASQDISSYLNLVSKRDSQHFWGNPWT

SEQ ID NO: 2535 - protein, 50 aa, synthetic construct
GGGFTIKDLPGSGSFAGGWGAYDKASQDIRKYLNYASNRYSQQGQTYPYT

SEQ ID NO: 2536 - protein, 50 aa, synthetic construct
GDYTFTSRSKGFNFAFDYGNEDSVSSSISSSNLHLGSTRASQHSRELPWT

SEQ ID NO: 2537 - protein, 49 aa, synthetic construct
GGFSLTDYPSGGYGDAYSRYFDRASQSIGNDLHSASSLYSQNNYNYPLT

SEQ ID NO: 2538 - protein, 49 aa, synthetic construct
GGFSLTDYPSGGYGDAYSRYFDRASQSIGNDLHDATNLDSQNNYNYPLT

SEQ ID NO: 2539 - protein, 49 aa, synthetic construct
GGFSLTDYPSGGYGDAYSRYFDRASQSIGNDLHDATKLDSQNNYNYPLT

SEQ ID NO: 2540 - protein, 44 aa, synthetic construct
GGYAISGTSGSGTGDYYGRKSARASHSVSSSYLGYTSTLHSLQL

SEQ ID NO: 2541 - protein, 49 aa, synthetic construct
GTSKVGVATGGHTGNYDRAWFASASQDISNYLNYTTTLAAHQHYSTPFT

SEQ ID NO: 2542 - protein, 47 aa, synthetic construct
GGFTFTNLPGSGSGNYLPARASQSVHSRYFATVSNRFSLQSDNLPYT

SEQ ID NO: 2543 - protein, 47 aa, synthetic construct
GGYTFTNNPGSGGGNYLPASVSSSISSSNLHSTSNLATGQTYNHPYT

SEQ ID NO: 2544 - protein, 49 aa, synthetic construct
GTSGIGVKTVTGAVGNYPYFDVRASQSVGGYLTAGSTLDSLQWSSFPYT

SEQ ID NO: 2545 - protein, 47 aa, synthetic construct
GGYTFTKYPGTGSGVFGFFDSASQGISNYLNYTNKLATQQGNTLSYT

SEQ ID NO: 2546 - protein, 47 aa, synthetic construct
GGFTFTNTPGSSYGYGHLDRSSHSIRSRRVASTSTLASSQSTHVPPT

SEQ ID NO: 2547 - protein, 50 aa, synthetic construct
GGYTFTNKNIPNNYALGYRSYFDRASQDISIRLNYTDRLQTFQGSHSPWT

SEQ ID NO: 2548 - protein, 55 aa, synthetic construct
GGFSLTDSSGGSYNYYNLWTGYYPLAYRASQSVSSGSLASASSLYSGQSYNYPFT

SEQ ID NO: 2549 - protein, 48 aa, synthetic construct
GDFNIKDKPLWGASGGPYFFDRASQSVGRNLGYTSRLHTQQYDTLPLT

SEQ ID NO: 2550 - protein, 47 aa, synthetic construct
GTSGYYWSTYSGYSGGPYFFDKASQNVGTAVAGTSNLASQKTLRTWT

SEQ ID NO: 2551 - protein, 51 aa, synthetic construct
GGYSFTGLPGSDNSVYYGGSYYFDKATEDIYNRLATVSNRFSQQGNTLPWT

SEQ ID NO: 2552 - protein, 52 aa, synthetic construct
GTSGIGVLPGSDNWFGDLLSLKGVERASQNIGTSIHYTNKLATQQRSTYPPT

SEQ ID NO: 2553 - protein, 52 aa, synthetic construct
GTSGYYWLPGSDNWFGDLLSLKGVEKASQNVRNNIAYTSTLESQQRSTYPPT

SEQ ID NO: 2554 - protein, 49 aa, synthetic construct
GGFTFLGATGGHTWTYGSSFDKASEDIHNRLAYTDRLQTHQYIQLHSFT

SEQ ID NO: 2555 - protein, 120 aa, synthetic construct
EVQLVESGGGLVQPGGSLRLSCAASGPIFRRNSMGWFRQAPGKEREFVAVITRSAGGEVTTYADSVKGRFTINADNSKNTAYLQMNSLKPEDTAVYYCAMSSVPRGSSDWGQGTLVTVSS

SEQ ID NO: 2556 - protein, 120 aa, synthetic construct
EVQLVESGGGLVQPGGSLRLSCAASGRIFRRNSMGWFRQAPGKEREFVAVITRSGGGEKTTYADSVKGRFTINADNSKNTAYLQMNSLKPEDTAVYYCAMSSVTRGSSDWGQGTLVTVSS

SEQ ID NO: 2557 - protein, 120 aa, synthetic construct
EVQLVESGGGLVQPGGSLRLSCAASRRIFRRRSMGWFRQAPGKEREFVAVITRSGGGEVTTYADSVKGRFTINADNSKNTAYLQMNSLKPEDTAVYYCAMSSVTRGSSDWGQGTLVTVSS

SEQ ID NO: 2558 - protein, 120 aa, synthetic construct
EVQLVESGGGLVQPGGSLRLSCAASGRIFRRNSMGWFRQAPGKEREFVAVITRSGGGEVTTYADSVKGRFTINADNSKNTAYLQMNSLKPEDTAVYYCAMSSVPRGSSDWGQGTLVTVSS

SEQ ID NO: 2559 - protein, 120 aa, synthetic construct
EVQLVESGGGLVQPGGSLRLSCAASGRIFRRNSMGWFRQAPGKEREFVAVITRSGGGEVTTYADSVKGRFTINADNSKNTAYLQMNSLKPEDTAVYYCAMSSVTRGSVDWGQGTLVTVSS

SEQ ID NO: 2560 - protein, 120 aa, synthetic construct
EVQLVESGGGLVQPGGSLRLSCAASGRIFRRNSMGWFRQAPGKEREFVAVITRAGGGEVTTYADSVKGRFTINADNSKNTAYLQMNSLKPEDTAVYYCAMSSVTRGSSDWGQGTLVTVSS

SEQ ID NO: 2561 - protein, 120 aa, synthetic construct
EVQLVESGGGLVQPGGSLRLSCAASGRIFRRNSMGWFRQAPGKEREFVAVITRSGGGEVTTYADSVKGRFTINADNSKNTAYLQMNSLKPEDTAVYYCAMSSITRGSSDWGQGTLVTVSS

SEQ ID NO: 2562 - protein, 120 aa, synthetic construct
EVQLVESGGGLVQPGGSLRLSCAASGRIFRRNSMGWFRQAPGKEREFVAVITRSGGGEVTTYADSVKGRFTINADNSKNTAYLQMNSLKPEDTAVYYCAMSSETRGSSDWGQGTLVTVSS

SEQ ID NO: 2563 - protein, 120 aa, synthetic construct
EVQLVESGGGLVQPGGSLRLSCAASGHIFRRNSMGWFRQAPGKEREFVAVITRSGGGEVTTYADSVKGRFTINADNSKNTAYLQMNSLKPEDTAVYYCAMSSVTRGSSDWGQGTLVTVSS

SEQ ID NO: 2564 - protein, 120 aa, synthetic construct
EVQLVESGGGLVQPGGSLRLSCAASGRIFRRNSMGWFRQAPGKEREFVAVITRSGGGEVTTYADSVKGRFTINADNSKNTAYLQMNSLKPEDTAVYYCAMSSVVRGSSHWGQGTLVTVSS

SEQ ID NO: 2565 - protein, 120 aa, synthetic construct
EVQLVESGGGLVQPGGSLRLSCAASGRTFRRNSMGWFRQAPGKEREFVAVITRSGGGAVTTYADSVKGRFTINADNSKNTAYLQMNSLKPEDTAVYYCAMSSVTRGSSDWGQGTLVTVSS

SEQ ID NO: 2566 - protein, 120 aa, synthetic construct
EVQLVESGGGLVQPGGSLRLSCAASGRIFHRNSMGWFRQAPGKEREFVAVITRSGVGEVTTYADSVKGRFTINADNSKNTAYLQMNSLKPEDTAVYYCAMSSVTRGSSDWGQGTLVTVSS

SEQ ID NO: 2567 - protein, 120 aa, synthetic construct
EVQLVESGGGLVQPGGSLRLSCAASGRIFRRNSMGWFRQAPGKEREFVAVITRSGGGEVTTYADSVKGRFTINADNSKNTAYLQMNSLKPEDTAVYYCAMSGVTRGSSDWGQGTLVTVSS

SEQ ID NO: 2568 - protein, 120 aa, synthetic construct
EVQLVESGGGLVQPGGSLRLSCAASGRIFERNSMGWFRQAPGKEREFVAVITKSGGGEVTTYADSVKGRFTINADNSKNTAYLQMNSLKPEDTAVYYCAMSSVTRGSSQWGQGTLVTVSS

SEQ ID NO: 2569 - protein, 120 aa, synthetic construct
EVQLVESGGGLVQPGGSLRLSCAASGRIFRRNSMGWFRQAPGKEREFVAVITHSGGGEVTTYADSVKGRFTINADNSKNTAYLQMNSLKPEDTAVYYCAMSSVNRGSSDWGQGTLVTVSS

SEQ ID NO: 2570 - protein, 120 aa, synthetic construct
EVQLVESGGGLVQPGGSLRLSCAASGGIFRRNSMGWFRQAPGKEREFVAVITRSGGGSVTTYADSVKGRFTINADNSKNTAYLQMNSLKPEDTAVYYCAMSSVTRGSSDWGQGTLVTVSS

SEQ ID NO: 2571 - protein, 120 aa, synthetic construct
EVQLVESGGGLVQPGGSLRLSCAASGTIFRRNSMGWFRQAPGKEREFVAVITRSGSGEVTTYADSVKGRFTINADNSKNTAYLQMNSLKPEDTAVYYCAMSSVTPGSSDWGQGTLVTVSS

SEQ ID NO: 2572 - protein, 120 aa, synthetic construct
EVQLVESGGGLVQPGGSLRLSCAASGPIFRRNSMGWFRQAPGKEREFVAVTTRSGGGEVTTYADSVKGRFTINADNSKNTAYLQMNSLKPEDTAVYYCAMSSVTRGISDWGQGTLVTVSS

SEQ ID NO: 2573 - protein, 120 aa, synthetic construct
EVQLVESGGGLVQPGGSLRLSCAASGRIFRRNSMGWFRQAPGKEREFVAVITRSGCGEVTTYADSVKGRFTINADNSKNTAYLQMNSLKPEDTAVYYCAMSSVTRGSPDWGQGTLVTVSS

SEQ ID NO: 2574 - protein, 120 aa, synthetic construct
EVQLVESGGGLVQPGGSLRLSCAASGSIFRRNSMGWFRQAPGKEREFVAVITRSGGGEVTTYADSVKGRFTINADNSKNTAYLQMNSLKPEDTAVYYCAMSSVERGSADWGQGTLVTVSS

SEQ ID NO: 2575 - protein, 120 aa, synthetic construct
EVQLVESGGGLVQPGGSLRLSCAASGRIFRRNSMGWFRQAPGKEREFVAVNTRSGTGEVTTYADSVKGRFTINADNSKNTAYLQMNSLKPEDTAVYYCAMSSVTRGSSDWGQGTLVTVSS

SEQ ID NO: 2576 - protein, 120 aa, synthetic construct
EVQLVESGGGLVQPGGSLRLSCAASGRIFRRNSMGWFRQAPGKEREFVAVITRAGGGEVTTYADSVKGRFTINADNSKNTAYLQMNSLKPEDTAVYYCAMSSLTRGSSDWGQGTLVTVSS

SEQ ID NO: 2577 - protein, 120 aa, synthetic construct
EVQLVESGGGLVQPGGSLRLSCAASGRIFRRNSMGWFRQAPGKEREFVAVLTRSGGGEVTTYADSVKGRFTINADNSKNTAYLQMNSLKPEDTAVYYCGMSSVTRGSSDWGQGTLVTVSS

SEQ ID NO: 2578 - protein, 120 aa, synthetic construct
EVQLVESGGGLVQPGGSLRLSCAASGRIFHRNSMGWFRQAPGKEREFVAVITRSGGGEVTTYADSVKGRFTINADNSKNTAYLQMNSLKPEDTAVYYCAMSSLTRGSSDWGQGTLVTVSS

SEQ ID NO: 2579 - protein, 120 aa, synthetic construct
EVQLVESGGGLVQPGGSLRLSCAASGRIFRRNSMGWFRQAPGKEREFVAVITRSGGGEMTTYADSVKGRFTINADNSKNTAYLQMNSLKPEDTAVYYCAMSSVTHGSSDWGQGTLVTVSS

SEQ ID NO: 2580 - protein, 120 aa, synthetic construct
EVQLVESGGGLVQPGGSLRLSCAASGRYFRRNSMGWFRQAPGKEREFVAVITRSGGGEVTTYADSVKGRFTINADNSKNTAYLQMNSLKPEDTAVYYCAMSSVPRGSSDWGQGTLVTVSS

SEQ ID NO: 2581 - protein, 120 aa, synthetic construct
EVQLVESGGGLVQPGGSLRLSCAASGRIFRRNSMGWFRQAPGKEREFVAVLTRSGGGEVTTYADSVKGRFTINADNSKNTAYLQMNSLKPEDTAVYYCAMSSVTPGSSDWGQGTLVTVSS

SEQ ID NO: 2582 - protein, 120 aa, synthetic construct
EVQLVESGGGLVQPGGSLRLSCAASGRIFRRNSMGWFRQAPGKEREFVAVITRSGGGELTTYADSVKGRFTINADNSKNTAYLQMNSLKPEDTAVYYCAMSSLTRGSSDWGQGTLVTVSS

SEQ ID NO: 2583 - protein, 120 aa, synthetic construct
EVQLVESGGGLVQPGGSLRLSCAASGPIFRRNSMGWFRQAPGKEREFVAVITRSGGGEVTTYADSVKGRFTINADNSKNTAYLQMNSLKPEDTAVYYCAMSSYTRGSSDWGQGTLVTVSS

SEQ ID NO: 2584 - protein, 120 aa, synthetic construct
EVQLVESGGGLVQPGGSLRLSCAASGRIFRRRSMGWFRQAPGKEREFVAVITMSGGGEVTTYADSVKGRFTINADNSKNTAYLQMNSLKPEDTAVYYCAMSSVTRGSSDWGQGTLVTVSS

SEQ ID NO: 2585 - protein, 120 aa, synthetic construct
EVQLVESGGGLVQPGGSLRLSCAASGRIFHRNSMGWFRQAPGKEREFVAVITRSGGGEVTTYADSVKGRFTINADNSKNTAYLQMNSLKPEDTAVYYCAMSSVRRGSSDWGQGTLVTVSS

SEQ ID NO: 2586 - protein, 120 aa, synthetic construct
EVQLVESGGGLVQPGGSLRLSCAASTRIFRRNSMGWFRQAPGKEREFVAVITRSGGREVTTYADSVKGRFTINADNSKNTAYLQMNSLKPEDTAVYYCAMSGVTRGSSDWGQGTLVTVSS

SEQ ID NO: 2587 - protein, 120 aa, synthetic construct
EVQLVESGGGLVQPGGSLRLSCAASGPIFRRNSMGWFRQAPGKEREFVAVITRSGGGEVTTYADSVKGRFTINADNSKNTAYLQMNSLKPEDTAVYYCAMSSVTRGSADWGQGTLVTVSS

SEQ ID NO: 2588 - protein, 120 aa, synthetic construct
EVQLVESGGGLVQPGGSLRLSCAASGRIFRRNSMGWFRQAPGKEREFVAVITRSGGGEMTTYADSVKGRFTINADNSKNTAYLQMNSLKPEDTAVYYCAMSKVTRGSSDWGQGTLVTVSS

SEQ ID NO: 2589 - protein, 120 aa, synthetic construct
EVQLVESGGGLVQPGGSLRLSCAASGRIFRRNSMGWFRQAPGKEREFVAVITRSGWGEVTTYADSVKGRFTINADNSKNTAYLQMNSLKPEDTAVYYCAMSSVTRGTSDWGQGTLVTVSS

SEQ ID NO: 2590 - protein, 120 aa, synthetic construct
EVQLVESGGGLVQPGGSLRLSCAASGRIFRRNSMGWFRQAPGKEREFVAVITRSGGGEVTTYADSVKGRFTINADNSKNTAYLQMNSLKPEDTAVYYCAMSSVPGGSSDWGQGTLVTVSS

SEQ ID NO: 2591 - protein, 120 aa, synthetic construct
EVQLVESGGGLVQPGGSLRLSCAASGRIFRRNSMGWFRQAPGKEREFVAVITRSGGGEVTTYADSVKGRFTINADNSKNTAYLQMNSLKPEDTAVYYCAMSSVGRGSSDWGQGTLVTVSS

SEQ ID NO: 2592 - protein, 120 aa, synthetic construct
EVQLVESGGGLVQPGGSLRLSCAASGRIFRRNSMGWFRQAPGKEREFVAVITRSGGGEVTTYADSVKGRFTINADNSKNTAYLQMNSLKPEDTAVYYCAMSSGTRGSSDWGQGTLVTVSS

SEQ ID NO: 2593 - protein, 120 aa, synthetic construct
EVQLVESGGGLVQPGGSLRLSCAASGRIFRRNSMGWFRQAPGKEREFVAVITRSGGGEVTTYADSVKGRFTINADNSKNTAYLQMNSLKPEDTAVYYCAMSSVTLGSSDWGQGTLVTVSS

SEQ ID NO: 2594 - protein, 120 aa, synthetic construct
EVQLVESGGGLVQPGGSLRLSCAASGRIFRRNSMGWFRQAPGKEREFVAVITRSGGGEVRTYADSVKGRFTINADNSKNTAYLQMNSLKPEDTAVYYCAMSSVTRGSSDWGQGTLVTVSS

SEQ ID NO: 2595 - protein, 120 aa, synthetic construct
EVQLVESGGGLVQPGGSLRLSCAASGRIFRRNSMGWFRQAPGKEREFVAVITRSGKGEVTTYADSVKGRFTINADNSKNTAYLQMNSLKPEDTAVYYCAMSSVTRGSSDWGQGTLVTVSS

SEQ ID NO: 2596 - protein, 120 aa, synthetic construct
EVQLVESGGGLVQPGGSLRLSCAASGRIFRRNSMGWFRQAPGKEREFVAVITRSGGDEVTTYADSVKGRFTINADNSKNTAYLQMNSLKPEDTAVYYCAMSSVTRGSSDWGQGTLVTVSS

SEQ ID NO: 2597 - protein, 120 aa, synthetic construct
EVQLVESGGGLVQPGGSLRLSCAASGRIFRRNSMGWFRQAPGKEREFVAVITRSGGGEVKTYADSVKGRFTINADNSKNTAYLQMNSLKPEDTAVYYCAMSSVTRGSSDWGQGTLVTVSS

SEQ ID NO: 2598 - protein, 120 aa, synthetic construct
EVQLVESGGGLVQPGGSLRLSCAASGRIFRRNSMGWFRQAPGKEREFVAVITRSGGGEVTTYADSVKGRFTINADNSKNTAYLQMNSLKPEDTAVYYCAMSSVTRGSSDWGQGTLVTVSS

SEQ ID NO: 2599 - protein, 120 aa, synthetic construct
EVQLVESGGGLVQPGGSLRLSCAASGRIFRRNSMGWFRQAPGKEREFVAVITRSGGGEVTTYADSVKGRFTINADNSKNTAYLQMNSLKPEDTAVYYCAMSSVTPGSSDWGQGTLVTVSS

SEQ ID NO: 2600 - protein, 120 aa, synthetic construct
EVQLVESGGGLVQPGGSLRLSCAASGRIFRRNSMGWFRQAPGKEREFVAVITRSGGGEVTTYADSVKGRFTINADNSKNTAYLQMNSLKPEDTAVYYCAMSSYTRGSSDWGQGTLVTVSS

SEQ ID NO: 2601 - protein, 120 aa, synthetic construct
EVQLVESGGGLVQPGGSLRLSCAASGRIFRRNSMGWFRQAPGKEREFVAVITRSGGGEVTTYADSVKGRFTINADNSKNTAYLQMNSLKPEDTAVYYCAMSSVVRGSSDWGQGTLVTVSS

SEQ ID NO: 2602 - protein, 120 aa, synthetic construct
EVQLVESGGGLVQPGGSLRLSCAASGRIFRRNSMGWFRQAPGKEREFVAVITRSGGGEVTTYADSVKGRFTINADNSKNTAYLQMNSLKPEDTAVYYCAMSSVTSGSSDWGQGTLVTVSS

SEQ ID NO: 2603 - protein, 120 aa, synthetic construct
EVQLVESGGGLVQPGGSLRLSCAASGRIFRRNSMGWFRQAPGKEREFVAVITRSGGGEVTTYADSVKGRFTINADNSKNTAYLQMNSLKPEDTAVYYCGMSSVTRGSSDWGQGTLVTVSS

SEQ ID NO: 2604 - protein, 120 aa, synthetic construct
EVQLVESGGGLVQPGGSLRLSCAASGRIFRRNSMGWFRQAPGKEREFVAVITRSGGGEVTTYADSVKGRFTINADNSKNTAYLQMNSLKPEDTAVYYCAMSSQTRGSSDWGQGTLVTVSS

SEQ ID NO: 2605 - protein, 120 aa, synthetic construct
EVQLVESGGGLVQPGGSLRLSCAASGRIFRRNSMGWFRQAPGKEREFVAVITRSGGGEVTTYADSVKGRFTINADNSKNTAYLQMNSLKPEDTAVYYCAMSSLTRGSSDWGQGTLVTVSS

SEQ ID NO: 2606 - protein, 120 aa, synthetic construct
EVQLVESGGGLVQPGGSLRLSCAASGRIFRRNSMGWFRQAPGKEREFVAVITRSGGGEVTTYADSVKGRFTINADNSKNTAYLQMNSLKPEDTAVYYCAMSSVTTGSSDWGQGTLVTVSS

SEQ ID NO: 2607 - protein, 120 aa, synthetic construct
EVQLVESGGGLVQPGGSLRLSCAASGRIFRRNSMGWFRQAPGKEREFVAVITRSGGGSVTTYADSVKGRFTINADNSKNTAYLQMNSLKPEDTAVYYCAMSSVTRGSSDWGQGTLVTVSS

SEQ ID NO: 2608 - protein, 120 aa, synthetic construct
EVQLVESGGGLVQPGGSLRLSCAASGRIFRRNSMGWFRQAPGKEREFVAVITRSGGGEVTTYADSVKGRFTINADNSKNTAYLQMNSLKPEDTAVYYCAMSSVTRGQSDWGQGTLVTVSS

SEQ ID NO: 2609 - protein, 120 aa, synthetic construct
EVQLVESGGGLVQPGGSLRLSCAASGRIFHRNSMGWFRQAPGKEREFVAVITRSGGGEVTTYADSVKGRFTINADNSKNTAYLQMNSLKPEDTAVYYCAMSSVTRGSSDWGQGTLVTVSS

SEQ ID NO: 2610 - protein, 120 aa, synthetic construct
EVQLVESGGGLVQPGGSLRLSCAASGRIFRRNSMGWFRQAPGKEREFVAVITRSGGGYVTTYADSVKGRFTINADNSKNTAYLQMNSLKPEDTAVYYCAMSSVTRGSSDWGQGTLVTVSS

SEQ ID NO: 2611 - protein, 120 aa, synthetic construct
EVQLVESGGGLVQPGGSLRLSCAASGRIFRRNSMGWFRQAPGKEREFVAVITRSAGGEVTTYADSVKGRFTINADNSKNTAYLQMNSLKPEDTAVYYCAMSSVRRGSSDWGQGTLVTVSS

SEQ ID NO: 2612 - protein, 120 aa, synthetic construct
EVQLVESGGGLVQPGGSLRLSCAASGRIFRRNSMGWFRQAPGKEREFVAVITRSGGGEVTTYADSVKGRFTINADNSKNTAYLQMNSLKPEDTAVYYCAMSSVTRGSPDWGQGTLVTVSS

SEQ ID NO: 2613 - protein, 120 aa, synthetic construct
EVQLVESGGGLVQPGGSLRLSCAASGRIFRRNSMGWFRQAPGKEREFVAVITRSGGGEVTTYADSVKGRFTINADNSKNTAYLQMNSLKPEDTAVYYCAMSSVTRGSGDWGQGTLVTVSS

SEQ ID NO: 2614 - protein, 120 aa, synthetic construct
EVQLVESGGGLVQPGGSLRLSCAASGPIFRRNSMGWFRQAPGKEREFVAVITRSGGGEVTTYADSVKGRFTINADNSKNTAYLQMNSLKPEDTAVYYCAMSSVTRGSSDWGQGTLVTVSS

SEQ ID NO: 2615 - protein, 120 aa, synthetic construct
EVQLVESGGGLVQPGGSLRLSCAASGRIFRRNSMGWFRQAPGKEREFVAVITRSGRGEVTTYADSVKGRFTINADNSKNTAYLQMNSLKPEDTAVYYCAMSSVTRGSSDWGQGTLVTVSS

SEQ ID NO: 2616 - protein, 120 aa, synthetic construct
EVQLVESGGGLVQPGGSLRLSCAASGRIFRRNSMGWFRQAPGKEREFVAVITRSGNGEVTTYADSVKGRFTINADNSKNTAYLQMNSLKPEDTAVYYCAMSSVTRGSSDWGQGTLVTVSS

SEQ ID NO: 2617 - protein, 120 aa, synthetic construct
EVQLVESGGGLVQPGGSLRLSCAASGRIFRRNSMGWFRQAPGKEREFVAVITRSGGGEVTTYADSVKGRFTINADNSKNTAYLQMNSLKPEDTAVYYCAMSNVTRGSSDWGQGTLVTVSS

SEQ ID NO: 2618 - protein, 120 aa, synthetic construct
EVQLVESGGGLVQPGGSLRLSCAASGRIFRRNSMGWFRQAPGKEREFVAVITRTGGGEVTTYADSVKGRFTINADNSKNTAYLQMNSLKPEDTAVYYCAMSSVTRGSSDWGQGTLVTVSS

SEQ ID NO: 2619 - protein, 120 aa, synthetic construct
EVQLVESGGGLVQPGGSLRLSCAASGRIFRRNSMGWFRQAPGKEREFVAVITRSGGGEVTTYADSVKGRFTINADNSKNTAYLQMNSLKPEDTAVYYCAMSSVTRGTSDWGQGTLVTVSS

SEQ ID NO: 2620 - protein, 120 aa, synthetic construct
EVQLVESGGGLVQPGGSLRLSCAASGRIFRRNSMGWFRQAPGKEREFVAVLTRSGGGEVTTYADSVKGRFTINADNSKNTAYLQMNSLKPEDTAVYYCAMSSVTRGSSDWGQGTLVTVSS

SEQ ID NO: 2621 - protein, 120 aa, synthetic construct
EVQLVESGGGLVQPGGSLRLSCAASGRIFRRNSMGWFRQAPGKEREFVAVIARSGGGEVTTYADSVKGRFTINADNSKNTAYLQMNSLKPEDTAVYYCAMSSVTRGSSDWGQGTLVTVSS

SEQ ID NO: 2622 - protein, 120 aa, synthetic construct
EVQLVESGGGLVQPGGSLRLSCAASGRIFRRNSMGWFRQAPGKEREFVAVITRSGGGEVTTYADSVKGRFTINADNSKNTAYLQMNSLKPEDTAVYYCAMSSFTRGSSDWGQGTLVTVSS

SEQ ID NO: 2623 - protein, 120 aa, synthetic construct
EVQLVESGGGLVQPGGSLRLSCAASGRIFRRNSMGWFRQAPGKEREFVAVITRSGGGEVTTYADSVKGRFTINADNSKNTAYLQMNSLKPEDTAVYYCAMSSSTRGSSDWGQGTLVTVSS

SEQ ID NO: 2624 - protein, 120 aa, synthetic construct
EVQLVESGGGLVQPGGSLRLSCAASGRIFRRNSMGWFRQAPGKEREFVAVITRSGGGEVTTYADSVKGRFTINADNSKNTAYLQMNSLKPEDTAVYYCAMSSTTRGSSDWGQGTLVTVSS

SEQ ID NO: 2625 - protein, 120 aa, synthetic construct
EVQLVESGGGLVQPGGSLRLSCAASGRIFRRNSMGWFRQAPGKEREFVAVITRSGGQEVTTYADSVKGRFTINADNSKNTAYLQMNSLKPEDTAVYYCAMSSVTRGSSDWGQGTLVTVSS

SEQ ID NO: 2626 - protein, 120 aa, synthetic construct
EVQLVESGGGLVQPGGSLRLSCAASGRIFRRNSMGWFRQAPGKEREFVAVITRSGGGEVTTYADSVKGRFTINADNSKNTAYLQMNSLKPEDTAVYYCAMSSVTVGSSDWGQGTLVTVSS

SEQ ID NO: 2627 - protein, 120 aa, synthetic construct
EVQLVESGGGLVQPGGSLRLSCAASGRIFRRNSMGWFRQAPGKEREFVAVITRSGGGEVTTYADSVKGRFTINADNSKNTAYLQMNSLKPEDTAVYYCAMSSPTRGSSDWGQGTLVTVSS

SEQ ID NO: 2628 - protein, 120 aa, synthetic construct
EVQLVESGGGLVQPGGSLRLSCAASGRIFRRNSMGWFRQAPGKEREFVAVITRSGEGEVTTYADSVKGRFTINADNSKNTAYLQMNSLKPEDTAVYYCAMSSVTRGSSDWGQGTLVTVSS

SEQ ID NO: 2629 - protein, 120 aa, synthetic construct
EVQLVESGGGLVQPGGSLRLSCAASGRIFRRNSMGWFRQAPGKEREFVAVITRSGGGEVTTYADSVKGRFTINADNSKNTAYLQMNSLKPEDTAVYYCAMSSVTKGSSDWGQGTLVTVSS

SEQ ID NO: 2630 - protein, 120 aa, synthetic construct
EVQLVESGGGLVQPGGSLRLSCAASGRIFRRNSMGWFRQAPGKEREFVAVITRSGGGEVTTYADSVKGRFTINADNSKNTAYLQMNSLKPEDTAVYYCAMSKVTRGSSDWGQGTLVTVSS

SEQ ID NO: 2631 - protein, 120 aa, synthetic construct
EVQLVESGGGLVQPGGSLRLSCAASGRIFRRNSMGWFRQAPGKEREFVAVITRSGGGIVTTYADSVKGRFTINADNSKNTAYLQMNSLKPEDTAVYYCAMSSVTRGSSDWGQGTLVTVSS

SEQ ID NO: 2632 - protein, 120 aa, synthetic construct
EVQLVESGGGLVQPGGSLRLSCAASGRIFRRNSMGWFRQAPGKEREFVAVITRSGGGEVTTYADSVKGRFTINADNSKNTAYLQMNSLKPEDTAVYYCAMSSDTRGSSDWGQGTLVTVSS

SEQ ID NO: 2633 - protein, 120 aa, synthetic construct
EVQLVESGGGLVQPGGSLRLSCAASGRIFRRNSMGWFRQAPGKEREFVAVITRSGGGEVTTYADSVKGRFTINADNSKNTAYLQMNSLKPEDTAVYYCAMSSVTRGSTDWGQGTLVTVSS

SEQ ID NO: 2634 - protein, 120 aa, synthetic construct
EVQLVESGGGLVQPGGSLRLSCAASGRIFRRNSMGWFRQAPGKEREFVAVITTSGGGEVTTYADSVKGRFTINADNSKNTAYLQMNSLKPEDTAVYYCAMSSVTRGSSDWGQGTLVTVSS

SEQ ID NO: 2635 - protein, 120 aa, synthetic construct
EVQLVESGGGLVQPGGSLRLSCAASGPIFRRNSMGWFRQAPGKEREFVAVITRSGGGEVTTYADSVKGRFTINADNSKNTAYLQMNSLKPEDTAVYYCAMSSVTRGSSLWGQGTLVTVSS

SEQ ID NO: 2636 - protein, 120 aa, synthetic construct
EVQLVESGGGLVQPGGSLRLSCAASGRIFRRNSMGWFRQAPGKEREFVAVITRGGGGEVTTYADSVKGRFTINADNSKNTAYLQMNSLKPEDTAVYYCAMSSVTRGSSDWGQGTLVTVSS

SEQ ID NO: 2637 - protein, 8 aa, synthetic construct
GPIFRRNS

SEQ ID NO: 2638 - protein, 8 aa, synthetic construct
GRIFRRNS

SEQ ID NO: 2639 - protein, 8 aa, synthetic construct
RRIFRRRS

SEQ ID NO: 2640 - protein, 8 aa, synthetic construct
GRIFRRNS

SEQ ID NO: 2641 - protein, 8 aa, synthetic construct
GRIFRRNS

SEQ ID NO: 2642 - protein, 8 aa, synthetic construct
GRIFRRNS

SEQ ID NO: 2643 - protein, 8 aa, synthetic construct
GRIFRRNS

SEQ ID NO: 2644 - protein, 8 aa, synthetic construct
GRIFRRNS

SEQ ID NO: 2645 - protein, 8 aa, synthetic construct
GHIFRRNS

SEQ ID NO: 2646 - protein, 8 aa, synthetic construct
GRIFRRNS

SEQ ID NO: 2647 - protein, 8 aa, synthetic construct
GRTFRRNS

SEQ ID NO: 2648 - protein, 8 aa, synthetic construct
GRIFHRNS

SEQ ID NO: 2649 - protein, 8 aa, synthetic construct
GRIFRRNS

SEQ ID NO: 2650 - protein, 8 aa, synthetic construct
GRIFERNS

SEQ ID NO: 2651 - protein, 8 aa, synthetic construct
GRIFRRNS

SEQ ID NO: 2652 - protein, 8 aa, synthetic construct
GGIFRRNS

SEQ ID NO: 2653 - protein, 8 aa, synthetic construct
GTIFRRNS

SEQ ID NO: 2654 - protein, 8 aa, synthetic construct
GPIFRRNS

SEQ ID NO: 2655 - protein, 8 aa, synthetic construct
GRIFRRNS

SEQ ID NO: 2656 - protein, 8 aa, synthetic construct
GSIFRRNS

SEQ ID NO: 2657 - protein, 8 aa, synthetic construct
GRIFRRNS

SEQ ID NO: 2658 - protein, 8 aa, synthetic construct
GRIFRRNS

SEQ ID NO: 2659 - protein, 8 aa, synthetic construct
GRIFRRNS

SEQ ID NO: 2660 - protein, 8 aa, synthetic construct
GRIFHRNS

SEQ ID NO: 2661 - protein, 8 aa, synthetic construct
GRIFRRNS

SEQ ID NO: 2662 - protein, 8 aa, synthetic construct
GRYFRRNS

SEQ ID NO: 2663 - protein, 8 aa, synthetic construct
GRIFRRNS

SEQ ID NO: 2664 - protein, 8 aa, synthetic construct
GRIFRRNS

SEQ ID NO: 2665 - protein, 8 aa, synthetic construct
GPIFRRNS

SEQ ID NO: 2666 - protein, 8 aa, synthetic construct
GRIFRRRS

SEQ ID NO: 2667 - protein, 8 aa, synthetic construct
GRIFHRNS

SEQ ID NO: 2668 - protein, 8 aa, synthetic construct
TRIFRRNS

SEQ ID NO: 2669 - protein, 8 aa, synthetic construct
GPIFRRNS

SEQ ID NO: 2670 - protein, 8 aa, synthetic construct
GRIFRRNS

SEQ ID NO: 2671 - protein, 8 aa, synthetic construct
GRIFRRNS

SEQ ID NO: 2672 - protein, 8 aa, synthetic construct
GRIFRRNS

SEQ ID NO: 2673 - protein, 8 aa, synthetic construct
GRIFRRNS

SEQ ID NO: 2674 - protein, 8 aa, synthetic construct
GRIFRRNS

SEQ ID NO: 2675 - protein, 8 aa, synthetic construct
GRIFRRNS

SEQ ID NO: 2676 - protein, 8 aa, synthetic construct
GRIFRRNS

SEQ ID NO: 2677 - protein, 8 aa, synthetic construct
GRIFRRNS

SEQ ID NO: 2678 - protein, 8 aa, synthetic construct
GRIFRRNS

SEQ ID NO: 2679 - protein, 8 aa, synthetic construct
GRIFRRNS

SEQ ID NO: 2680 - protein, 8 aa, synthetic construct
GRIFRRNS

SEQ ID NO: 2681 - protein, 8 aa, synthetic construct
GRIFRRNS

SEQ ID NO: 2682 - protein, 8 aa, synthetic construct
GRIFRRNS

SEQ ID NO: 2683 - protein, 8 aa, synthetic construct
GRIFRRNS

SEQ ID NO: 2684 - protein, 8 aa, synthetic construct
GRIFRRNS

SEQ ID NO: 2685 - protein, 8 aa, synthetic construct
GRIFRRNS

SEQ ID NO: 2686 - protein, 8 aa, synthetic construct
GRIFRRNS

SEQ ID NO: 2687 - protein, 8 aa, synthetic construct
GRIFRRNS

SEQ ID NO: 2688 - protein, 8 aa, synthetic construct
GRIFRRNS

SEQ ID NO: 2689 - protein, 8 aa, synthetic construct
GRIFRRNS

SEQ ID NO: 2690 - protein, 8 aa, synthetic construct
GRIFRRNS

SEQ ID NO: 2691 - protein, 8 aa, synthetic construct
GRIFHRNS

SEQ ID NO: 2692 - protein, 8 aa, synthetic construct
GRIFRRNS

SEQ ID NO: 2693 - protein, 8 aa, synthetic construct
GRIFRRNS

SEQ ID NO: 2694 - protein, 8 aa, synthetic construct
GRIFRRNS

SEQ ID NO: 2695 - protein, 8 aa, synthetic construct
GRIFRRNS

SEQ ID NO: 2696 - protein, 8 aa, synthetic construct
GPIFRRNS

SEQ ID NO: 2697 - protein, 8 aa, synthetic construct
GRIFRRNS

SEQ ID NO: 2698 - protein, 8 aa, synthetic construct
GRIFRRNS

SEQ ID NO: 2699 - protein, 8 aa, synthetic construct
GRIFRRNS

SEQ ID NO: 2700 - protein, 8 aa, synthetic construct
GRIFRRNS

SEQ ID NO: 2701 - protein, 8 aa, synthetic construct
GRIFRRNS

SEQ ID NO: 2702 - protein, 8 aa, synthetic construct
GRIFRRNS

SEQ ID NO: 2703 - protein, 8 aa, synthetic construct
GRIFRRNS

SEQ ID NO: 2704 - protein, 8 aa, synthetic construct
GRIFRRNS

SEQ ID NO: 2705 - protein, 8 aa, synthetic construct
GRIFRRNS

SEQ ID NO: 2706 - protein, 8 aa, synthetic construct
GRIFRRNS

SEQ ID NO: 2707 - protein, 8 aa, synthetic construct
GRIFRRNS

SEQ ID NO: 2708 - protein, 8 aa, synthetic construct
GRIFRRNS

SEQ ID NO: 2709 - protein, 8 aa, synthetic construct
GRIFRRNS

SEQ ID NO: 2710 - protein, 8 aa, synthetic construct
GRIFRRNS

SEQ ID NO: 2711 - protein, 8 aa, synthetic construct
GRIFRRNS

SEQ ID NO: 2712 - protein, 8 aa, synthetic construct
GRIFRRNS

SEQ ID NO: 2713 - protein, 8 aa, synthetic construct
GRIFRRNS

SEQ ID NO: 2714 - protein, 8 aa, synthetic construct
GRIFRRNS

SEQ ID NO: 2715 - protein, 8 aa, synthetic construct
GRIFRRNS

SEQ ID NO: 2716 - protein, 8 aa, synthetic construct
GRIFRRNS

SEQ ID NO: 2717 - protein, 8 aa, synthetic construct
GPIFRRNS

SEQ ID NO: 2718 - protein, 8 aa, synthetic construct
GRIFRRNS

SEQ ID NO: 2719 - protein, 10 aa, synthetic construct
ITRSAGGEVT

SEQ ID NO: 2720 - protein, 10 aa, synthetic construct
ITRSGGGEKT

SEQ ID NO: 2721 - protein, 10 aa, synthetic construct
ITRSGGGEVT

SEQ ID NO: 2722 - protein, 10 aa, synthetic construct
ITRSGGGEVT

SEQ ID NO: 2723 - protein, 10 aa, synthetic construct
ITRSGGGEVT

SEQ ID NO: 2724 - protein, 10 aa, synthetic construct
ITRAGGGEVT

SEQ ID NO: 2725 - protein, 10 aa, synthetic construct
ITRSGGGEVT

SEQ ID NO: 2726 - protein, 10 aa, synthetic construct
ITRSGGGEVT

SEQ ID NO: 2727 - protein, 10 aa, synthetic construct
ITRSGGGEVT

SEQ ID NO: 2728 - protein, 10 aa, synthetic construct
ITRSGGGEVT

SEQ ID NO: 2729 - protein, 10 aa, synthetic construct
ITRSGGGAVT

SEQ ID NO: 2730 - protein, 10 aa, synthetic construct
ITRSGVGEVT

SEQ ID NO: 2731 - protein, 10 aa, synthetic construct
ITRSGGGEVT

SEQ ID NO: 2732 - protein, 10 aa, synthetic construct
ITKSGGGEVT

SEQ ID NO: 2733 - protein, 10 aa, synthetic construct
ITHSGGGEVT

SEQ ID NO: 2734 - protein, 10 aa, synthetic construct
ITRSGGGSVT

SEQ ID NO: 2735 - protein, 10 aa, synthetic construct
ITRSGSGEVT

SEQ ID NO: 2736 - protein, 10 aa, synthetic construct
TTRSGGGEVT

SEQ ID NO: 2737 - protein, 10 aa, synthetic construct
ITRSGCGEVT

SEQ ID NO: 2738 - protein, 10 aa, synthetic construct
ITRSGGGEVT

SEQ ID NO: 2739 - protein, 10 aa, synthetic construct
NTRSGTGEVT

SEQ ID NO: 2740 - protein, 10 aa, synthetic construct
ITRAGGGEVT

SEQ ID NO: 2741 - protein, 10 aa, synthetic construct
LTRSGGGEVT

SEQ ID NO: 2742 - protein, 10 aa, synthetic construct
ITRSGGGEVT

SEQ ID NO: 2743 - protein, 10 aa, synthetic construct
ITRSGGGEMT

SEQ ID NO: 2744 - protein, 10 aa, synthetic construct
ITRSGGGEVT

SEQ ID NO: 2745 - protein, 10 aa, synthetic construct
LTRSGGGEVT

SEQ ID NO: 2746 - protein, 10 aa, synthetic construct
ITRSGGGELT

SEQ ID NO: 2747 - protein, 10 aa, synthetic construct
ITRSGGGEVT

SEQ ID NO: 2748 - protein, 10 aa, synthetic construct
ITMSGGGEVT

SEQ ID NO: 2749 - protein, 10 aa, synthetic construct
ITRSGGGEVT

SEQ ID NO: 2750 - protein, 10 aa, synthetic construct
ITRSGGREVT

SEQ ID NO: 2751 - protein, 10 aa, synthetic construct
ITRSGGGEVT

SEQ ID NO: 2752 - protein, 10 aa, synthetic construct
ITRSGGGEMT

SEQ ID NO: 2753 - protein, 10 aa, synthetic construct
ITRSGWGEVT

SEQ ID NO: 2754 - protein, 10 aa, synthetic construct
ITRSGGGEVT

SEQ ID NO: 2755 - protein, 10 aa, synthetic construct
ITRSGGGEVT

SEQ ID NO: 2756 - protein, 10 aa, synthetic construct
ITRSGGGEVT

SEQ ID NO: 2757 - protein, 10 aa, synthetic construct
ITRSGGGEVT

SEQ ID NO: 2758 - protein, 10 aa, synthetic construct
ITRSGGGEVR

SEQ ID NO: 2759 - protein, 10 aa, synthetic construct
ITRSGKGEVT

SEQ ID NO: 2760 - protein, 10 aa, synthetic construct
ITRSGGDEVT

SEQ ID NO: 2761 - protein, 10 aa, synthetic construct
ITRSGGGEVK

SEQ ID NO: 2762 - protein, 10 aa, synthetic construct
ITRSGGGEVT

SEQ ID NO: 2763 - protein, 10 aa, synthetic construct
ITRSGGGEVT

SEQ ID NO: 2764 - protein, 10 aa, synthetic construct
ITRSGGGEVT

SEQ ID NO: 2765 - protein, 10 aa, synthetic construct
ITRSGGGEVT

SEQ ID NO: 2766 - protein, 10 aa, synthetic construct
ITRSGGGEVT

SEQ ID NO: 2767 - protein, 10 aa, synthetic construct
ITRSGGGEVT

SEQ ID NO: 2768 - protein, 10 aa, synthetic construct
ITRSGGGEVT

SEQ ID NO: 2769 - protein, 10 aa, synthetic construct
ITRSGGGEVT

SEQ ID NO: 2770 - protein, 10 aa, synthetic construct
ITRSGGGEVT

SEQ ID NO: 2771 - protein, 10 aa, synthetic construct
ITRSGGGSVT

SEQ ID NO: 2772 - protein, 10 aa, synthetic construct
ITRSGGGEVT

SEQ ID NO: 2773 - protein, 10 aa, synthetic construct
ITRSGGGEVT

SEQ ID NO: 2774 - protein, 10 aa, synthetic construct
ITRSGGGYVT

SEQ ID NO: 2775 - protein, 10 aa, synthetic construct
ITRSAGGEVT

SEQ ID NO: 2776 - protein, 10 aa, synthetic construct
ITRSGGGEVT

SEQ ID NO: 2777 - protein, 10 aa, synthetic construct
ITRSGGGEVT

SEQ ID NO: 2778 - protein, 10 aa, synthetic construct
ITRSGGGEVT

SEQ ID NO: 2779 - protein, 10 aa, synthetic construct
ITRSGRGEVT

SEQ ID NO: 2780 - protein, 10 aa, synthetic construct
ITRSGNGEVT

SEQ ID NO: 2781 - protein, 10 aa, synthetic construct
ITRSGGGEVT

SEQ ID NO: 2782 - protein, 10 aa, synthetic construct
ITRTGGGEVT

SEQ ID NO: 2783 - protein, 10 aa, synthetic construct
ITRSGGGEVT

SEQ ID NO: 2784 - protein, 10 aa, synthetic construct
LTRSGGGEVT

SEQ ID NO: 2785 - protein, 10 aa, synthetic construct
IARSGGGEVT

SEQ ID NO: 2786 - protein, 10 aa, synthetic construct
ITRSGGGEVT

SEQ ID NO: 2787 - protein, 10 aa, synthetic construct
ITRSGGGEVT

SEQ ID NO: 2788 - protein, 10 aa, synthetic construct
ITRSGGGEVT

SEQ ID NO: 2789 - protein, 10 aa, synthetic construct
ITRSGGQEVT

SEQ ID NO: 2790 - protein, 10 aa, synthetic construct
ITRSGGGEVT

SEQ ID NO: 2791 - protein, 10 aa, synthetic construct
ITRSGGGEVT

SEQ ID NO: 2792 - protein, 10 aa, synthetic construct
ITRSGEGEVT

SEQ ID NO: 2793 - protein, 10 aa, synthetic construct
ITRSGGGEVT

SEQ ID NO: 2794 - protein, 10 aa, synthetic construct
ITRSGGGEVT

SEQ ID NO: 2795 - protein, 10 aa, synthetic construct
ITRSGGGIVT

SEQ ID NO: 2796 - protein, 10 aa, synthetic construct
ITRSGGGEVT

SEQ ID NO: 2797 - protein, 10 aa, synthetic construct
ITRSGGGEVT

SEQ ID NO: 2798 - protein, 10 aa, synthetic construct
ITTSGGGEVT

SEQ ID NO: 2799 - protein, 10 aa, synthetic construct
ITRSGGGEVT

SEQ ID NO: 2800 - protein, 10 aa, synthetic construct
ITRGGGGEVT

SEQ ID NO: 2801 - protein, 11 aa, synthetic construct
AMSSVPRGSSD

SEQ ID NO: 2802 - protein, 11 aa, synthetic construct
AMSSVTRGSSD

SEQ ID NO: 2803 - protein, 11 aa, synthetic construct
AMSSVTRGSSD

SEQ ID NO: 2804 - protein, 11 aa, synthetic construct
AMSSVPRGSSD

SEQ ID NO: 2805 - protein, 11 aa, synthetic construct
AMSSVTRGSVD

SEQ ID NO: 2806 - protein, 11 aa, synthetic construct
AMSSVTRGSSD

SEQ ID NO: 2807 - protein, 11 aa, synthetic construct
AMSSITRGSSD

SEQ ID NO: 2808 - protein, 11 aa, synthetic construct
AMSSETRGSSD

SEQ ID NO: 2809 - protein, 11 aa, synthetic construct
AMSSVTRGSSD

SEQ ID NO: 2810 - protein, 11 aa, synthetic construct
AMSSVVRGSSH

SEQ ID NO: 2811 - protein, 11 aa, synthetic construct
AMSSVTRGSSD

SEQ ID NO: 2812 - protein, 11 aa, synthetic construct
AMSSVTRGSSD

SEQ ID NO: 2813 - protein, 11 aa, synthetic construct
AMSGVTRGSSD

SEQ ID NO: 2814 - protein, 11 aa, synthetic construct
AMSSVTRGSSQ

SEQ ID NO: 2815 - protein, 11 aa, synthetic construct
AMSSVNRGSSD

SEQ ID NO: 2816 - protein, 11 aa, synthetic construct
AMSSVTRGSSD

SEQ ID NO: 2817 - protein, 11 aa, synthetic construct
AMSSVTPGSSD

SEQ ID NO: 2818 - protein, 11 aa, synthetic construct
AMSSVTRGISD

SEQ ID NO: 2819 - protein, 11 aa, synthetic construct
AMSSVTRGSPD

SEQ ID NO: 2820 - protein, 11 aa, synthetic construct
AMSSVERGSAD

SEQ ID NO: 2821 - protein, 11 aa, synthetic construct
AMSSVTRGSSD

SEQ ID NO: 2822 - protein, 11 aa, synthetic construct
AMSSLTRGSSD

SEQ ID NO: 2823 - protein, 11 aa, synthetic construct
GMSSVTRGSSD

SEQ ID NO: 2824 - protein, 11 aa, synthetic construct
AMSSLTRGSSD

SEQ ID NO: 2825 - protein, 11 aa, synthetic construct
AMSSVTHGSSD

SEQ ID NO: 2826 - protein, 11 aa, synthetic construct
AMSSVPRGSSD

SEQ ID NO: 2827 - protein, 11 aa, synthetic construct
AMSSVTPGSSD

SEQ ID NO: 2828 - protein, 11 aa, synthetic construct
AMSSLTRGSSD

SEQ ID NO: 2829 - protein, 11 aa, synthetic construct
AMSSYTRGSSD

SEQ ID NO: 2830 - protein, 11 aa, synthetic construct
AMSSVTRGSSD

SEQ ID NO: 2831 - protein, 11 aa, synthetic construct
AMSSVRRGSSD

SEQ ID NO: 2832 - protein, 11 aa, synthetic construct
AMSGVTRGSSD

SEQ ID NO: 2833 - protein, 11 aa, synthetic construct
AMSSVTRGSAD

SEQ ID NO: 2834 - protein, 11 aa, synthetic construct
AMSKVTRGSSD

SEQ ID NO: 2835 - protein, 11 aa, synthetic construct
AMSSVTRGTSD

SEQ ID NO: 2836 - protein, 11 aa, synthetic construct
AMSSVPGGSSD

SEQ ID NO: 2837 - protein, 11 aa, synthetic construct
AMSSVGRGSSD

SEQ ID NO: 2838 - protein, 11 aa, synthetic construct
AMSSGTRGSSD

SEQ ID NO: 2839 - protein, 11 aa, synthetic construct
AMSSVTLGSSD

SEQ ID NO: 2840 - protein, 11 aa, synthetic construct
AMSSVTRGSSD

SEQ ID NO: 2841 - protein, 11 aa, synthetic construct
AMSSVTRGSSD

SEQ ID NO: 2842 - protein, 11 aa, synthetic construct
AMSSVTRGSSD

SEQ ID NO: 2843 - protein, 11 aa, synthetic construct
AMSSVTRGSSD

SEQ ID NO: 2844 - protein, 11 aa, synthetic construct
AMSSVTRGSSD

SEQ ID NO: 2845 - protein, 11 aa, synthetic construct
AMSSVTPGSSD

SEQ ID NO: 2846 - protein, 11 aa, synthetic construct
AMSSYTRGSSD

SEQ ID NO: 2847 - protein, 11 aa, synthetic construct
AMSSVVRGSSD

SEQ ID NO: 2848 - protein, 11 aa, synthetic construct
AMSSVTSGSSD

SEQ ID NO: 2849 - protein, 11 aa, synthetic construct
GMSSVTRGSSD

SEQ ID NO: 2850 - protein, 11 aa, synthetic construct
AMSSQTRGSSD

SEQ ID NO: 2851 - protein, 11 aa, synthetic construct
AMSSLTRGSSD

SEQ ID NO: 2852 - protein, 11 aa, synthetic construct
AMSSVTTGSSD

SEQ ID NO: 2853 - protein, 11 aa, synthetic construct
AMSSVTRGSSD

SEQ ID NO: 2854 - protein, 11 aa, synthetic construct
AMSSVTRGQSD

SEQ ID NO: 2855 - protein, 11 aa, synthetic construct
AMSSVTRGSSD

SEQ ID NO: 2856 - protein, 11 aa, synthetic construct
AMSSVTRGSSD

SEQ ID NO: 2857 - protein, 11 aa, synthetic construct
AMSSVRRGSSD

SEQ ID NO: 2858 - protein, 11 aa, synthetic construct
AMSSVTRGSPD

SEQ ID NO: 2859 - protein, 11 aa, synthetic construct
AMSSVTRGSGD

SEQ ID NO: 2860 - protein, 11 aa, synthetic construct
AMSSVTRGSSD

SEQ ID NO: 2861 - protein, 11 aa, synthetic construct
AMSSVTRGSSD

SEQ ID NO: 2862 - protein, 11 aa, synthetic construct
AMSSVTRGSSD

SEQ ID NO: 2863 - protein, 11 aa, synthetic construct
AMSNVTRGSSD

SEQ ID NO: 2864 - protein, 11 aa, synthetic construct
AMSSVTRGSSD

SEQ ID NO: 2865 - protein, 11 aa, synthetic construct
AMSSVTRGTSD

SEQ ID NO: 2866 - protein, 11 aa, synthetic construct
AMSSVTRGSSD

SEQ ID NO: 2867 - protein, 11 aa, synthetic construct
AMSSVTRGSSD

SEQ ID NO: 2868 - protein, 11 aa, synthetic construct
AMSSFTRGSSD

SEQ ID NO: 2869 - protein, 11 aa, synthetic construct
AMSSSTRGSSD

SEQ ID NO: 2870 - protein, 11 aa, synthetic construct
AMSSTTRGSSD

SEQ ID NO: 2871 - protein, 11 aa, synthetic construct
AMSSVTRGSSD

SEQ ID NO: 2872 - protein, 11 aa, synthetic construct
AMSSVTVGSSD

SEQ ID NO: 2873 - protein, 11 aa, synthetic construct
AMSSPTRGSSD

SEQ ID NO: 2874 - protein, 11 aa, synthetic construct
AMSSVTRGSSD

SEQ ID NO: 2875 - protein, 11 aa, synthetic construct
AMSSVTKGSSD

SEQ ID NO: 2876 - protein, 11 aa, synthetic construct
AMSKVTRGSSD

SEQ ID NO: 2877 - protein, 11 aa, synthetic construct
AMSSVTRGSSD

SEQ ID NO: 2878 - protein, 11 aa, synthetic construct
AMSSDTRGSSD

SEQ ID NO: 2879 - protein, 11 aa, synthetic construct
AMSSVTRGSTD

SEQ ID NO: 2880 - protein, 11 aa, synthetic construct
AMSSVTRGSSD

SEQ ID NO: 2881 - protein, 11 aa, synthetic construct
AMSSVTRGSSL

SEQ ID NO: 2882 - protein, 11 aa, synthetic construct
AMSSVTRGSSD

SEQ ID NO: 2883 - protein, 121 aa, synthetic construct
EVQLVESGGGLVQPGGSLRLSCAASGFTLNDYAMGWFRQAPGKERELVAWIARYDGSTLYADSVKGRFTISADNSKNTAYLQMNSLKPEDTAVYYCARVDWALNAAPFDYWGQGTLVTVSS

SEQ ID NO: 2884 - protein, 120 aa, synthetic construct
EVQLVESGGGLVQPGGSLRLSCAASGFTLSSNWMGWFRQAPGKEREMVAAIDWSGGSALYADSVKGRFTISADNSKNTAYLQMNSLKPEDTAVYYCAKDALSNSARFDHWGQGTLVTVSS

SEQ ID NO: 2885 - protein, 120 aa, synthetic construct
EVQLVESGGGLVQPGGSLRLSCAASGTFQRINAMGWFRQAPGKEREFVSTINWSGSNTYYADSVKGRFTISADNSKNTAYLQMNSLKPEDTAVYYCASSYSSSSGLGDIWGQGTLVTVSS

SEQ ID NO: 2886 - protein, 119 aa, synthetic construct
EVQLVESGGGLVQPGGSLRLSCAASGSIDRINAMGWFRQATGKEREWVASVLRGGYTWYADSVKGRFTISADNSKNTAYLQMNSLKPEDTAVYYCARDSYSTSFWFDPWGQGTLVTVSS

SEQ ID NO: 2887 - protein, 116 aa, synthetic construct
EVQLVESGGGLVQPGGSLRLSCAASGFAFGDSWMGWFRQAPGKEREWVASVLRGGYTWYADSVKGRFTISADNSKNTAYLQMNSLKPEDTAVYYCARESEGWFDPWGQGTLVTVSS

SEQ ID NO: 2888 - protein, 119 aa, synthetic construct
EVQLVESGGGLVQPGGSLRLSCAASGNTFSGGFMGWFRQAPGKEREWVASVLRGGYTWYADSVKGRFTISADNSKNTAYLQMNSLKPEDTAVYYCAISPVAWHAKFDSWGQGTLVTVSS

SEQ ID NO: 2889 - protein, 121 aa, synthetic construct
EVQLVESGGGLVQPGGSLRLSCAASGRSFSMYVMGWFRQAPGKEREGVSFISGSDGSTLYADSVKGRFTISADNSKNTAYLQMNSLKPEDTAVYYCARGSIAARPVFFDYWGQGTLVTVSS

SEQ ID NO: 2890 - protein, 117 aa, synthetic construct
EVQLVESGGGLVQPGGSLRLSCAASGFAFSSYAMGWFRQAPGKEREFVARITWNGGSAYYADSVKGRFTISADNSKNTAYLQMNSLKPEDTAVYYCAAGATGWFDPWGQGTLVTVSS

SEQ ID NO: 2891 - protein, 116 aa, synthetic construct
EVQLVESGGGLVQPGGSLRLSCAASGNTFSGGFMGWFRQAPGKEREWVASVLRGGYTWYADSVKGRFTISADNSKNTAYLQMNSLKPEDTAVYYCVNGYSYGRDYWGQGTLVTVSS

SEQ ID NO: 2892 - protein, 118 aa, synthetic construct
EVQLVESGGGLVQPGGSLRLSCAASGNTFSGGFMGWFRQAPGKEREWVASVLRGGYTWYADSVKGRFTISADNSKNTAYLQMNSLKPEDTAVYYCASDPWGTRYFDHWGQGTLVTVSS

SEQ ID NO: 2893 - protein, 118 aa, synthetic construct
EVQLVESGGGLVQPGGSLRLSCAASGNIFSDNLMGWFRQAPGKERELVAAISWSGGETLYADSVKGRFTISADNSKNTAYLQMNSLKPEDTAVYYCAKDAFYEPFDPWGQGTLVTVSS

SEQ ID NO: 2894 - protein, 119 aa, synthetic construct
EVQLVESGGGLVQPGGSLRLSCAASGRTFSAYGMGWFRQAPGKEREFVAAITPSSRTTYYADSVKGRFTISADNSKNTAYLQMNSLKPEDTAVYYCAKDNWGEWLMPWWGQGTLVTVSS

SEQ ID NO: 2895 - protein, 111 aa, synthetic construct
EVQLVESGGGLVQPGGSLRLSCAASGRTFSFMGWFRQAPGKEREWVASVLRGGYTWYADSVKGRFTISADNSKNTAYLQMNSLKPEDTAVYYCATESMDYWGQGTLVTVSS

SEQ ID NO: 2896 - protein, 120 aa, synthetic construct
EVQLVESGGGLVQPGGSLRLSCAASGSISSIHAMGWFRQAPGKEREFVATISRSGVGTFYADSVKGRFTISADNSKNTAYLQMNSLKPEDTAVYYCASSYSSSSGLGDIWGQGTLVTVSS

SEQ ID NO: 2897 - protein, 117 aa, synthetic construct
EVQLVESGGGLVQPGGSLRLSCAASGSILSFNHIGWFRQAPGKEREGVAWIARYDGSTLYADSVKGRFTISADNSKNTAYLQMNSLKPEDTAVYYCARARGGYVDYWGQGTLVTVSS

SEQ ID NO: 2898 - protein, 116 aa, synthetic construct
EVQLVESGGGLVQPGGSLRLSCAASGTTFSSAAMGWFRQAPGKEREWVASVLRGGYTWYADSVKGRFTISADNSKNTAYLQMNSLKPEDTAVYYCARDPVELGDYWGQGTLVTVSS

SEQ ID NO: 2899 - protein, 115 aa, synthetic construct
EVQLVESGGGLVQPGGSLRLSCAASGFDFSVSWMGWFRQAPGKEREWVASVLRGGYTWYADSVKGRFTISADNSKNTAYLQMNSLKPEDTAVYYCAREGSWFDYWGQGTLVTVSS

SEQ ID NO: 2900 - protein, 120 aa, synthetic construct
EVQLVESGGGLVQPGGSLRLSCAASGFSLDYYAMGWFRQAPGKEREVVAIIDTNGDNTLYADSVKGRFTISADNSKNTAYLQMNSLKPEDTAVYYCARGRGYGDYVGAYWGQGTLVTVSS

SEQ ID NO: 2901 - protein, 114 aa, synthetic construct
EVQLVESGGGLVQPGGSLRLSCAASGRTYDAMGWFRQAPGKEREWVASVLRGGYTWYADSVKGRFTISADNSKNTAYLQMNSLKPEDTAVYYCARDVDYRFDSWGQGTLVTVSS

SEQ ID NO: 2902 - protein, 112 aa, synthetic construct
EVQLVESGGGLVQPGGSLRLSCAASGNTFSGGFMGWFRQAPGKEREWVASVLRGGYTWYADSVKGRFTISADNSKNTAYLQMNSLKPEDTAVYYCATPRGYWGQGTLVTVSS

SEQ ID NO: 2903 - protein, 118 aa, synthetic construct
EVQLVESGGGLVQPGGSLRLSCAASGNTFSGGFMGWFRQAPGKEREWVASVLRGGYTWYADSVKGRFTISADNSKNTAYLQMNSLKPEDTAVYYCARGGAGSDWFGPWGQGTLVTVSS

SEQ ID NO: 2904 - protein, 120 aa, synthetic construct
EVQLVESGGGLVQPGGSLRLSCAASGFTLENNMMGWFRQAPGKEREMVAAISWSGGSALYADSVKGRFTISADNSKNTAYLQMNSLKPEDTAVYYCARGDGYSYGNFDYWGQGTLVTVSS

SEQ ID NO: 2905 - protein, 116 aa, synthetic construct
EVQLVESGGGLVQPGGSLRLSCAASGFTLSSNWMGWFRQAPGKEREWVASVLRGGYTWYADSVKGRFTISADNSKNTAYLQMNSLKPEDTAVYYCARERLGWFDPWGQGTLVTVSS

SEQ ID NO: 2906 - protein, 118 aa, synthetic construct; identical to SEQ ID NO: 39

SEQ ID NO: 2907 - protein, 114 aa, synthetic construct
EVQLVESGGGLVQPGGSLRLSCAASGNTFSGGFMGWFRQAPGKEREWVASVLRGGYTWYADSVKGRFTISADNSKNTAYLQMNSLKPEDTAVYYCTTVGYGDYWGQGTLVTVSS

SEQ ID NO: 2908 - protein, 115 aa, synthetic construct
EVQLVESGGGLVQPGGSLRLSCAASGNAFRINAMGWFRQAPGKEREFVAGIIRSGGETLYADSVKGRFTISADNSKNTAYLQMNSLKPEDTAVYYCAGGRAFDIWGQGTLVTVSS

SEQ ID NO: 2909 - protein, 115 aa, synthetic construct
EVQLVESGGGLVQPGGSLRLSCAASGLTFSNYVMGWFRQAPGKEREVVAGILSDGRELYADSVKGRFTISADNSKNTAYLQMNSLKPEDTAVYYCARDVFGEGHWGQGTLVTVSS

SEQ ID NO: 2910 - protein, 121 aa, synthetic construct
EVQLVESGGGLVQPGGSLRLSCAASGRTFSTDAMGWFRQAPGKEREFVATINWKDGFTYYADSVKGRFTISADNSKNTAYLQMNSLKPEDTAVYYCAGVGHDYGDYLFDYWGQGTLVTVSS

SEQ ID NO: 2911 - protein, 119 aa, synthetic construct
EVQLVESGGGLVQPGGSLRLSCAASGFTLENNMMGWFRQAPGKERELVAAIDWSGGSTIYADSVKGRFTISADNSKNTAYLQMNSLKPEDTAVYYCARGHDYGDYIAYWGQGTLVTVSS

SEQ ID NO: 2912 - protein, 120 aa, synthetic construct
EVQLVESGGGLVQPGGSLRLSCAASGRSFSSDWIGWFRQAPGKERELVAAIDWSGGSALYADSVKGRFTISADNSKNTAYLQMNSLKPEDTAVYYCARVNWNNVGWFDPWGQGTLVTVSS

SEQ ID NO: 2913 - protein, 115 aa, synthetic construct
EVQLVESGGGLVQPGGSLRLSCAASGRAFESYAMGWFRQAPGKERELVATIGWSGTDYADSVKGRFTISADNSKNTAYLQMNSLKPEDTAVYYCAKGYTSGLSDWGQGTLVTVSS

SEQ ID NO: 2914 - protein, 119 aa, synthetic construct
EVQLVESGGGLVQPGGSLRLSCAASGFAFGDSWMGWFRQAPGKERELVAAIDWSGGSALYADSVKGRFTISADNSKNTALQMNSLKPEDTAVYYCAKVHSDFRAGWDVWGQGTLVTVSS

SEQ ID NO: 2915 - protein, 119 aa, synthetic construct
EVQLVESGGGLVQPGGSLRLSCAASGFLFDSYAMGWFRQAPGKEREFVAAVSQSGLLTFYADSVKGRFTISADNSKNTAYLQMNSLKPEDTAVYYCASRTSSWWWFDPWGQGTLVTVSS

SEQ ID NO: 2916 - protein, 112 aa, synthetic construct
EVQLVESGGGLVQPGGSLRLSCAASGTTFSPYTMGWFRQAPGKEREFVASINSGSRTNYADSVKGRFTISADNSKNTAYLQMNSLKPEDTAVYYCVRSEIGWGQGTLVTVSS

SEQ ID NO: 2917 - protein, 121 aa, synthetic construct
EVQLVESGGGLVQPGGSLRLSCAASGFTLENNMMGWFRQAPGKERELVAAISMSGDDTIYADSVKGRFTISADNSKNTAYLQMNSLKPEDTAVYYCARQGDTVMVSGIDYWGQGTLVTVSS

SEQ ID NO: 2918 - protein, 120 aa, synthetic construct
EVQLVESGGGLVQPGGSLRLSCAASGNTFNFNVMGWFRQAPGKEREAVASIWRSGGNTYYADSVKGRFTISADNSKNTAYLQMNSLKPEDTAVYYCARDLEWRPYYMDVWGQGTLVTVSS

SEQ ID NO: 2919 - protein, 115 aa, synthetic construct
EVQLVESGGGLVQPGGSLRLSCAASGNTFSGGFMGWFRQAPGKEREWVASVLRGGYTWYADSVKGRFTISADNSKNTAYLQMNSLKPEDTAVYYCVFGGVWQDVWGQGTLVTVSS

SEQ ID NO: 2920 - protein, 116 aa, synthetic construct
EVQLVESGGGLVQPGGSLRLSCAASGFTFSEYPMGWFRQAPGKEREFVAVVNWNGDSTYYADSVKGRFTISADNSKNTAYLQMNSLKPEDTAVYYCARGSDWYRYWGQGTLVTVSS

SEQ ID NO: 2921 - protein, 119 aa, synthetic construct
EVQLVESGGGLVQPGGSLRLSCAASGRTVSSHAMGWFRQAPGKEREFVAAITSSGSTYYADSVKGRFTISADNSKNTAYLQMNSLKPEDTAVYYCASSYSSSSGLGDIWGQGTLVTVSS

SEQ ID NO: 2922 - protein, 118 aa, synthetic construct
EVQLVESGGGLVQPGGSLRLSCAASGFSFDRWAMGWFRQAPGKERELVARISWNGGSTYYADSVKGRFTISADNSKNTAYLQMNSLKPEDTAVYYCARDDGWLQFMHWGQGTLVTVSS

SEQ ID NO: 2923 - protein, 114 aa, synthetic construct
EVQLVESGGGLVQPGGSLRLSCAASGMTTIGPMGWFRQAPGKEREFVASIAWGDGNTYYADSVKGRFTISADNSKNTAYLQMNSLKPEDTAVYYCVRGGSRTLWGQGTLVTVSS

SEQ ID NO: 2924 - protein, 114 aa, synthetic construct
EVQLVESGGGLVQPGGSLRLSCAASGNTFSGGFMGWFRQAPGKEREWVATVLRGGYTWYADSVKGRFTISADNSKNTAYLQMNSLKPEDTAVYYCASGGFLASWGQGTLVTVSS

SEQ ID NO: 2925 - protein, 118 aa, synthetic construct
EVQLVESGGGLVQPGGSLRLSCAASGFTFADYAMGWFRQAPGKEREMVAAIGWNSGTTEYADSVKGRFTISADNSKNTAYLQMNSLKPEDTAVYYCARDTNGWFFDFWGQGTLVTVSS

SEQ ID NO: 2926 - protein, 117 aa, synthetic construct
EVQLVESGGGLVQPGGSLRLSCAASGSIFGLGAMGWFRQAPGKERELVAITWGGSTTLYADSVKGRFTISADNSKNTAYLQMNSLKPEDTAVYYCATDQGQWLFDFWGQGTLVTVSS

SEQ ID NO: 2927 - protein, 117 aa, synthetic construct
EVQLVESGGGLVQPGGSLRLSCAASGGTFNAMGWFRQAPGKEREWVASVLRGGYTWYADSVKGRFTISADNSKNTAYLQMNSLKPEDTAVYYCAKDGGSSGTYQNWWGQGTLVTVSS

SEQ ID NO: 2928 - protein, 115 aa, synthetic construct
EVQLVESGGGLVQPGGSLRLSCAASGRTFSNYVMGWFRQAPGKERELVASISSFGSTYYADSVKGRFTISADNSKNTAYLQMNSLKPEDTAVYYCARSGGFLSDWGQGTLVTVSS

SEQ ID NO: 2929 - protein, 120 aa, synthetic construct
EVQLVESGGGLVQPGGSLRLSCAASGRALNMYVMGWFRQAPGKERELVAAIDWSGGSALYADSVKGRFTISADNSKNTAYLQMNSLKPEDTAVYYCASGDGYSMDYFDPWGQGTLVTVSS

SEQ ID NO: 2930 - protein, 114 aa, synthetic construct
EVQLVESGGGLVQPGGSLRLSCAASGRTSDIYGMGWFRQAPGKEREAVASIWRSGGNTYYADSVKGRFTISADNSKNTAYLQMNSLKPEDTAVYYCASSTLDVWGQGTLVTVSS

SEQ ID NO: 2931 - protein, 121 aa, synthetic construct
EVQLVESGGGLVQPGGSLRLSCAASGRTFIGYHMGWFRQAPGKEREFVAAISWTGESTLYADSVKGRFTISADNSKNTAYLQMNSLKPEDTAVYYCARDDYGDYRRYFQHWGQGTLVTVSS

SEQ ID NO: 2932 - protein, 118 aa, synthetic construct
EVQLVESGGGLVQPGGSLRLSCAASGIPSIHAMGWFRQAPGKERELVAVITREGSTYYADSVKGRFTISADNSKNTAYLQMNSLKPEDTAVYYCASSYSSSSGLGDIWGQGTLVTVSS

SEQ ID NO: 2933 - protein, 113 aa, synthetic construct
EVQLVESGGGLVQPGGSLRLSCAASGRTEANYAMGWFRQAPGKEREFVAAISWDGGATAYADSVKGRFTISADNSKNTAYLQMNSLKPEDTAVYYCGDYEGHWGQGTLVTVSS

SEQ ID NO: 2934 - protein, 119 aa, synthetic construct
EVQLVESGGGLVQPGGSLRLSCAASGFLFDSYAMGWFRQAPGKEREFVAAISTGGGWRTYADSVKGRFTISADNSKNTAYLQMNSLKPEDTAVYYCAKRGNDNWYFDLWGQGTLVTVSS

SEQ ID NO: 2935 - protein, 118 aa, synthetic construct
EVQLVESGGGLVQPGGSLRLSCAASGFTFSPSWMGWFRQAPGKEREWVASVLRGGYTWYADSVKGRFTISADNSKNTAYLQMNSLKPEDTAVYYCARESTIVGAIDSWGQGTLVTVSS

SEQ ID NO: 2936 - protein, 118 aa, synthetic construct
EVQLVESGGGLVQPGGSLRLSCAASGFSFDDYVMGWFRQAPGKERELVAVIVGEAITRYADSVKGRFTISADNSKNTAYLQMNSLKPEDTAVYYCARRGGSGRAFDIWGQGTLVTVSS

SEQ ID NO: 2937 - protein, 119 aa, synthetic construct
EVQLVESGGGLVQPGGSLRLSCAASGFPFDDYAMGWFRQAPGKERELVAVIRWTGMNTHYADSVKGRFTISADNSKNTAYLQMNSLKPEDTAVYYCAKGIAVAGAFDYWGQGTLVTVSS

SEQ ID NO: 2938 - protein, 117 aa, synthetic construct
EVQLVESGGGLVQPGGSLRLSCAASGNTFSGGFMGWFRQAPGKEREWVASVLRGGYTWYADSVKGRFTISADNSKNTAYLQMNSLKPEDTAVYYCAHSKGYNWFDPWGQGTLVTVSS

SEQ ID NO: 2939 - protein, 111 aa, synthetic construct
EVQLVESGGGLVQPGGSLRLSCAASGNTFSGGFMGWFRQAPGKEREWVASVLRGGYTWYADSVKGRFTISADNSKNTAYLQMNSLKPEDTAVYYCTTYRGWGQGTLVTVSS

SEQ ID NO: 2940 - protein, 119 aa, synthetic construct
EVQLVESGGGLVQPGGSLRLSCAASGFTLGYYVMGWFRQAPGKEREFVATINWSGTLTSYADSVKGRFTISADNSKNTAYLQMNSLKPEDTAVYYCARWVGPKYYFDYWGQGTLVTVSS

SEQ ID NO: 2941 - protein, 120 aa, synthetic construct
EVQLVESGGGLVQPGGSLRLSCAASGRTFSTYVMGWFRQAPGKEREFVAAISAGGSWTGYADSVKGRFTISADNSKNTAYLQMNSLKPEDTAVYYCAREGGYRSGWFDHWGQGTLVTVSS

SEQ ID NO: 2942 - protein, 113 aa, synthetic construct
EVQLVESGGGLVQPGGSLRLSCAASGFTFSPSWMGWFRQAPGKEREWVASVLRGGYTWYADSVKGRFTISADNSKNTAYLQMNSLKPEDTAVYYCARDDLDYWGQGTLVTVSS

SEQ ID NO: 2943 - protein, 118 aa, synthetic construct
EVQLVESGGGLVQPGGSLRLSCAASGNTFSGGFMGWFRQAPGKEREWVASVLRGGYTWYADSVKGRFTISADNSKNTAYLQMNSLKPEDTAVYYCTRGDTAMATFDYWGQGTLVTVSS

SEQ ID NO: 2944 - protein, 116 aa, synthetic construct
EVQLVESGGGLVQPGGSLRLSCAASGRTFSFGWFRQAPGKEREFVASVLRGGYTWYADSVKGRFTISADNSKNTAYLQMNSLKPEDTAVYYCAEGGTTAKGWFDPWGQGTLVTVSS

SEQ ID NO: 2945 - protein, 117 aa, synthetic construct
EVQLVESGGGLVQPGGSLRLSCAASGRAIGSYGMGWFRQAPGKEREFVATISVSGVYTYYADSVKGRFTISADNSKNTAYLQMNSLKPEDTAVYYCARATPGGVVPWGQGTLVTVSS

SEQ ID NO: 2946 - protein, 118 aa, synthetic construct
EVQLVESGGGLVQPGGSLRLSCAASGFAFSNFGMGWFRQAPGKERELVSAIGWSGASTYYADSVKGRFTISADNSKNTAYLQMNSLKPEDTAVYYCARRGRTIPFDYWGQGTLVTVSS

SEQ ID NO: 2947 - protein, 125 aa, synthetic construct
EVQLVESGGGLVQPGGSLRLSCAASGFTFGNYDMGWFRQAPGKEREFVAAITGSGRSTYYADSVKGRFTISADNSKNTAYLQMNSLKPEDTAVYYCARGRIAASGTKVYWYFDLWGQGTLVTVSS

SEQ ID NO: 2948 - protein, 118 aa, synthetic construct
EVQLVESGGGLVQPGGSLRLSCAASGTTFSSAAMGWFRQAPGKEREWVASVLRGGYTWYADSVKGRFTISADNSKNTAYLQMNSLKPEDTAVYYCVTDPRQWLGHDYWGQGTLVTVSS

SEQ ID NO: 2949 - protein, 120 aa, synthetic construct
EVQLVESGGGLVQPGGSLRLSCAASGFTFDRSWMGWFRQAPGKEREWVSTIYSNGTPAYADSVKGRFTISADNSKNTAYLQMNSLKPEDTAVYYCARRGLPSYSYGMDVWGQGTLVTVSS

SEQ ID NO: 2950 - protein, 113 aa, synthetic construct
EVQLVESGGGLVQPGGSLRLSCAASGHTFRGYAMGWFRQAPGKEREAVAAISWSGDNTYYADSVKGRFTISADNSKNTAYLQMNSLKPEDTAVYYCGDYEGHWGQGTLVTVSS

SEQ ID NO: 2951 - protein, 123 aa, synthetic construct
EVQLVESGGGLVQPGGSLRLSCAASGGTFNGRAMGWFRQAPGKEREFVAAISSIGDTYYADSVKGRFTISADNSKNTAYLQMNSLKPEDTAVYYCARWRLDRRQGFYYAMDVWGQGTLVTVSS

SEQ ID NO: 2952 - protein, 124 aa, synthetic construct
EVQLVESGGGLVQPGGSLRLSCAASGRTFSSFAMGWFRQAPGKEREFVAAISGSGEDTYYADSVKGRFTISADNSKNTAYLQMNSLKPEDTAVYYCARWRLDRRQGFYYAMDVWGQGTLVTVSS

SEQ ID NO: 2953 - protein, 125 aa, synthetic construct
EVQLVESGGGLVQPGGSLRLSCAASGSIRSLNAMGWFRQAPGKEREFVAAINWDSARTYYADSVKGRFTISADNSKNTAYLQMNSLKPEDTAVYYCARWSAKRHSDTMTYYMDVWGQGTLVTVSS

SEQ ID NO: 2954 - protein, 126 aa, synthetic construct
EVQLVESGGGLVQPGGSLRLSCAASGGLTFSSYAMGWFRQAPGKEREFVAAISWSGGRTYYADSVKGRFTISADNSKNTAYLQMNSLKPEDTAVYYCARWSAKRHSDTMTYYMDVWGQGTLVTVSS

SEQ ID NO: 2955 - protein, 127 aa, synthetic construct
EVQLVESGGGLVQPGGSLRLSCAASGSSFSLADYAMGWFRQAPGKEREFVAAISYNVGTTYYADSVKGRFTISADNSKNTAYLQMNSLKPEDTAVYYCARWSAKRHSDTMTYYMDVWGQGTLVTVSS

SEQ ID NO: 2956 - protein, 122 aa, synthetic construct
EVQLVESGGGLVQPGGSLRLSCAASGRTFANNAMGWFRQAPGKEREFVAAINWSGGNTYYADSVKGRFTISADNSKNTAYLQMNSLKPEDTAVYYCAKWSYYGSGLYGMDVWGQGTLVTVSS

SEQ ID NO: 2957 - protein, 122 aa, synthetic construct
EVQLVESGGGLVQPGGSLRLSCAASGFIGNYHAMGWFRQAPGKEREFVAAIRWSDGSSYYADSVKGRFTISADNSKNTAYLQMNSLKPEDTAVYYCAKWSYYGSGLYGMDVWGQGTLVTVSS

SEQ ID NO: 2958 - protein, 112 aa, synthetic construct
EVQLVESGGGLVQPGGSLRLSCAASGFTFSDYAMGWFRQAPGKERELVARIGHDGSTDYADSVKGRFTISADNSKNTAYLQMNSLKPEDTAVYYCLGGLDPWGQGTLVTVSS

SEQ ID NO: 2959 - protein, 120 aa, synthetic construct
EVQLVESGGGLVQPGGSLRLSCAASGGAFSTVAMGWFRQAPGKEREAVASIWRSGDSTYYADSVKGRFTISADNSKNTAYLQMNSLKPEDTAVYYCASSYSSSSGLGDIWGQGTLVTVSS

SEQ ID NO: 2960 - protein, 121 aa, synthetic construct
EVQLVESGGGLVQPGGSLRLSCAASGLTLNDYAMGWFRQAPGKERELVAWIARYDGSTLYADSVKGRFTISADNSKNTAYLQMNSLKPEDTAVYYCARVDWALNAAPFDYWGQGTLVTVSS

SEQ ID NO: 2961 - protein, 123 aa, synthetic construct
EVQLVESGGGLVQPGGSLRLSCAASGSILSINTMGWFRQAPGKEREFVAAITSAGGTTYYADSVKGRFTISADNSKNTAYLQMNSLKPEDTAVYYCARWHYDILTGYYWLDSWGQGTLVTVSS

SEQ ID NO: 2962 - protein, 123 aa, synthetic construct
EVQLVESGGGLVQPGGSLRLSCAASGNIPPINAMGWFRQAPGKEREFVAAINYSGGSTYYADSVKGRFTISADNSKNTAYLQMNSLKPEDTAVYYCARWHYDILTGYYWLDSWGQGTLVTVSS

SEQ ID NO: 2963 - protein, 121 aa, synthetic construct
EVQLVESGGGLVQPGGSLRLSCAASGRSFKDDAMGWFRQAPGKEREFVAAISWSGDSTHYADSVKGRFTISADNSKNTAYLQMNSLKPEDTAVYYCARWVWASGTYWIDYWGQGTLVTVSS

SEQ ID NO: 2964 - protein, 122 aa, synthetic construct
EVQLVESGGGLVQPGGSLRLSCAASGSMSSNYAMGWFRQAPGKEREFVAAIDWSGGNTYYADSVKGRFTISADNSKNTAYLQMNSLKPEDTAVYYCAKWFYYGSGLYTLDVWGQGTLVTVSS

SEQ ID NO: 2965 - protein, 122 aa, synthetic construct
EVQLVESGGGLVQPGGSLRLSCAASGRTFSDDAMGWFRQAPGKEREFVAAISRSGGNTYYADSVKGRFTISADNSKNTAYLQMNSLKPEDTAVYYCAKWFYYGSGLYTLDVWGQGTLVTVSS

SEQ ID NO: 2966 - protein, 118 aa, synthetic construct
EVQLVESGGGLVQPGGSLRLSCAASGGTFTIYPMGWFRQAPGKEREWVAGINEYGGRYADSVKGRFTISADNSKNTAYLQMNSLKPEDTAVYYCARDLNAMGDAYDIWGQGTLVTVSS

SEQ ID NO: 2967 - protein, 120 aa, synthetic construct
EVQLVESGGGLVQPGGSLRLSCAASGRTFSPYTMGWFRQAPGKEREWVAGISQSGGSTAYADSVKGRFTISADNSKNTAYLQMNSLKPEDTAVYYCARDLNAMGDAYDIWGQGTLVTVSS

SEQ ID NO: 2968 - protein, 123 aa, synthetic construct
EVQLVESGGGLVQPGGSLRLSCAASGIIASDSAMGWFRQAPGKEREFVAAIRWSGKETWYADSVKGRFTISADNSKNTAYLQMNSLKPEDTAVYYCARWGGVTFGGVYPLEYWGQGTLVTVSS

SEQ ID NO: 2969 - protein, 123 aa, synthetic construct
EVQLVESGGGLVQPGGSLRLSCAASGSIDTINTMGWFRQAPGKEREFVAAITPSSRTTYYVDSVKGRFTISADNSKNTAYLQMNSLKPEDTAVYYCARWGGVTFGGVYPLEYWGQGTLVTVSS

SEQ ID NO: 2970 - protein, 123 aa, synthetic construct
EVQLVESGGGLVQPGGSLRLSCAASGFTFSSDWMGWFRQAPGKEREFVAAINRSGHSTSYADSVKGRFTISADNSKNTAYLQMNSLKPEDTAVYYCARWGGVTFGGVYPLEYWGQGTLVTVSS

SEQ ID NO: 2971 - protein, 125 aa, synthetic construct
EVQLVESGGGLVQPGGSLRLSCAASGSMSSINAMGWFRQAPGKEREFVAAINYEGDRTYYADSVKGRFTISADNSKNTAYLQMNSLKPEDTAVYYCARWTRGLVSGTYYYYMDVWGQGTLVTVSS

SEQ ID NO: 2972 - protein, 125 aa, synthetic construct
EVQLVESGGGLVQPGGSLRLSCAASGDTFSSKAMGWFRQAPGKEREFVAAIRWSVSSTYYADSVKGRFTISADNSKNTAYLQMNSLKPEDTAVYYCARWTRGLVSGTYYYYMDVWGQGTLVTVSS

SEQ ID NO: 2973 - protein, 125 aa, synthetic construct
EVQLVESGGGLVQPGGSLRLSCAASGFTFSNYAMGWFRQAPGKEREFVAAINWNSRSTYYADSVKGRFTISADNSKNTAYLQMNSLKPEDTAVYYCARWRSIWSGYDDYYYMDVWGQGTLVTVSS

SEQ ID NO: 2974 - protein, 125 aa, synthetic construct
EVQLVESGGGLVQPGGSLRLSCAASGSTIENYAMGWFRQAPGKEREFVAAIDWSGGSTYYADSVKGRFTISADNSKNTAYLQMNSLKPEDTAVYYCARWRSIWSGYDDYYYMDVWGQGTLVTVSS

SEQ ID NO: 2975 - protein, 125 aa, synthetic construct
EVQLVESGGGLVQPGGSLRLSCAASSRTVSSHAMGWFRQAPGKEREFVAAISWSGVTTYYADSVKGRFTISADNSKNTAYLQMNSLKPEDTAVYYCARWRSIWSGYDDYYYMDVWGQGTLVTVSS

SEQ ID NO: 2976 - protein, 125 aa, synthetic construct
EVQLVESGGGLVQPGGSLRLSCAASGSSFSAYAMGWFRQAPGKEREFVSLINWSSGKTIYADSVKGRFTISADNSKNTAYLQMNSLKPEDTAVYYCARVRIFNHVHRPSYYFDYWGQGTLVTVSS

SEQ ID NO: 2977 - protein, 118 aa, synthetic construct
EVQLVESGGGLVQPGGSLRLSCAASGPTFSTNVMGWFRQAPGKEREFVSSIHWGGSSTVYADSVKGRFTISADNSKNTAYLQMNSLKPEDTAVYYCVTYSAYDFRNAWGQGTLVTVSS

SEQ ID NO: 2978 - protein, 117 aa, synthetic construct
EVQLVESGGGLVQPGGSLRLSCAASGMTTIGPMGWFRQAPGKEREFVAAINWSGSSTVYADSVKGRFTISADNSKNTAYLQMNSLKPEDTAVYYCVTYSAYDFRNAWGQGTLVTVSS

SEQ ID NO: 2979 - protein, 118 aa, synthetic construct
EVQLVESGGGLVQPGGSLRLSCAASGTAASFNPMGWFRQAPGKEREFVAAISWSGGSTNYADSVKGRFTISADNSKNTAYLQMNSLKPEDTAVYYCVTYSAYDFRNAWGQGTLVTVSS

SEQ ID NO: 2980 - protein, 113 aa, synthetic construct
EVQLVESGGGLVQPGGSLRLSCAASGNTFSGGFMGWFRQAPGKEREWVASVLRGGYTWYADSVKGRFTISADNSKNTAYLQMNSLKPEDTAVYYCTTEGFDPWGQGTLVTVSS

SEQ ID NO: 2981 - protein, 123 aa, synthetic construct
EVQLVESGGGLVQPGGSLRLSCAASGSIFSMNTMGWFRQAPGKEREFVGAINWSGGSTIYADSVKGRFTISADNSKNTAYLQMNSLKPEDTAVYYCARWDYDILTNYYWLEYWGQGTLVTVSS

SEQ ID NO: 2982 - protein, 122 aa, synthetic construct
EVQLVESGGGLVQPGGSLRLSCAASGRTLSDRAMGWFRQAPGKEREFVAAITDNGGSTYYADSVKGRFTISADNSKNTAYLQMNSLKPEDTAVYYCARWYSSSGDYYYMDVWGQGTLVTVSS

SEQ ID NO: 2983 - protein, 122 aa, synthetic construct
EVQLVESGGGLVQPGGSLRLSCAASGRTFSSYAMGWFRQAPGKEREFVAAIDWSDGSTYYADSVKGRFTISADNSKNTAYLQMNSLKPEDTAVYYCARWYSSSGDYYYMDVWGQGTLVTVSS

SEQ ID NO: 2984 - protein, 123 aa, synthetic construct
EVQLVESGGGLVQPGGSLRLSCAASGSTFSKHHAMGWFRQAPGKEREFVAAIRWSGGNTYYADSVKGRFTISADNSKNTAYLQMNSLKPEDTAVYYCARWYSSSGDYYYMDVWGQGTLVTVSS

SEQ ID NO: 2985 - protein, 123 aa, synthetic construct
EVQLVESGGGLVQPGGSLRLSCAASGTITSAVFMGWFRQAPGKEREFVAAISWSGGDTNYADSVKGRFTISADNSKNTAYLQMNSLKPEDTAVYYCARWGGITFGGVYPLDYWGQGTLVTVSS

SEQ ID NO: 2986 - protein, 122 aa, synthetic construct
EVQLVESGGGLVQPGGSLRLSCAASGFTFSTYTMGWFRQAPGKEREFVAAISPSGNTYYADSVKGRFTISADNSKNTAYLQMNSLKPEDTAVYYCARWGGITFGGVYPLDYWGQGTLVTVSS

SEQ ID NO: 2987 - protein, 120 aa, synthetic construct
EVQLVESGGGLVQPGGSLRLSCAASGFAFSRYGMGWFRQAPGKERELVATIGWSGSSTFYADSVKGRFTISADNSKNTAYLQMNSLKPEDTAVYYCARDGGPYYYGLDVWGQGTLVTVSS

SEQ ID NO: 2988 - protein, 119 aa, synthetic construct
EVQLVESGGGLVQPGGSLRLSCAASGFPFDDYAMGWFRQAPGKERELVAVIRWTGMSTHYADSVKGRFTISADNSKNTAYLQMNSLKPEDTAVYYCAKGIAVAGAFDYWGQGTLVTVSS

SEQ ID NO: 2989 - protein, 120 aa, synthetic construct
EVQLVESGGGLVQPGGSLRLSCAASGFAFSSDWMGWFRQAPGKEREGVAWIARYDGSTLYADSVKGRFTISADNSKNTAYLQMNSLKPEDTAVYYCAKDLDSSGRFFQHWGQGTLVTVSS

SEQ ID NO: 2990 - protein, 118 aa, synthetic construct
EVQLVESGGGLVQPGGSLRLSCAASGNTFSGGFMGWFRQAPGKEREWVASVLRGGYTWYADSVKGRFTISADNSKNTAYLQMNSLKPEDTAVYYCANGGRVWWAFDYWGQGTLVTVSS

SEQ ID NO: 2991 - protein, 119 aa, synthetic construct
EVQLVESGGGLVQPGGSLRLSCAASGRDISSYIMGWFRQAPGKERELVAIIDTNGDDTLYADSAKGRFTISADNSKNTAYLQMNSLKPEDTAVYYCANGGRVWWAFDYWGQGTLVTVSS

SEQ ID NO: 2992 - protein, 119 aa, synthetic construct
EVQLVESGGGLVQPGGSLRLSCAASGNTFSGGFMGWFRQAPGKEREWVASVLRGGYTWYADSVKGRFTISADNSKNTAYLQMNSLKPEDTAVYYCARDHTAMVAPFDYWGQGTLVTVSS

SEQ ID NO: 2993 - protein, 113 aa, synthetic construct
EVQLVESGGGLVQPGGSLRLSCAASGDTFSGGFMGWFRQAPGKEREWVASVLRGGYTWYADSVKGRFTISADNSKNTAYLQMNSLKPEDTAVYYCTRGGMDVWGQGTLVTVSS

SEQ ID NO: 2994 - protein, 120 aa, synthetic construct
EVQLVESGGGLVQPGGSLRLSCAASGRTLRRYVMGWFRQAPGKERELVAAIDWSGGSALYADSVKGRFTISADNSKNTAYLQMNSLKPEDTAVYYCTWGDGYNLGAFDIWGQGTLVTVSS

SEQ ID NO: 2995 - protein, 120 aa, synthetic construct
EVQLVESGGGLVQPGGSLRLSCAASGFTLNDYAMGWFRQAPGKERELVAWIARYDGSTLYADSVKGRFTISADNSKNTAYLQMNSLKPEDTAVYYCTWGDGYNLGAFDIWGQGTLVTVSS

SEQ ID NO: 2996 - protein, 119 aa, synthetic construct
EVQLVESGGGLVQPGGSLRLSCAASGNTFSGGFMGWFRQAPGKEREWVASVLRGGYTWYADSVKGRFTISADNSKNTAYLQMNSLKPEDTAVYYCATVGGRQRTLFDDWGQGTLVTVSS

SEQ ID NO: 2997 - protein, 111 aa, synthetic construct
EVQLVESGGGLVQPGGSLRLSCAASGNTFSGGFMGWFRQAPGKEREWVASVLRGGYTWYADSVKGRFTISADNSKNTAYLQMNSLKPEDTAVYYCAGTGLWGQGTLVTVSS

SEQ ID NO: 2998 - protein, 111 aa, synthetic construct
EVQLVESGGGLVQPGGSLRLSCAASGFTFSPSWMGWFRQAPGKEREWVASVLRGGYTWYADSVKGRFTISADNSKNTAYLQMNSLKPEDTAVYYCDAADYWGQGTLVTVSS

SEQ ID NO: 2999 - protein, 111 aa, synthetic construct
EVQLVESGGGLVQPGGSLRLSCAASGNTFSGGFMGWFRQAPGKEREWVASVLRGGYTWYADSVKGRFTISADNSKNTAYLQMNSLKPEDTAVYYCDAADYWGQGTLVTVSS

SEQ ID NO: 3000 - protein, 113 aa, synthetic construct
EVQLVESGGGLVQPGGSLRLSCAASGRTFSFMGWFRQAPGKEREWVASVLRGGYTWYADSVKGRFTISADNSKNTAYLQMNSLKPEDTAVYYCAKDGGWFDPWGQGTLVTVSS

SEQ ID NO: 3001 - protein, 115 aa, synthetic construct
EVQLVESGGGLVQPGGSLRLSCAASGNTFSGGFMGWFRQAPGKEREWVASVLRGGYTWYADSVKGRFTISADNSKNTAYLQMNSLKPEDTAVYYCAKDGGWFDPWGQGTLVTVSS

SEQ ID NO: 3002 - protein, 115 aa, synthetic construct
EVQLVESGGGLVQPGGSLRLSCAASGFTFSPSWMGWFRQAPGKEREWVASVLRGGYTWYADSVKGRFTISADNSKNTAYLQMNSLKPEDTAVYYCAKDGGWFDPWGQGTLVTVSS

SEQ ID NO: 3003 - protein, 113 aa, synthetic construct
EVQLVESGGGLVQPGGSLRLSCAASGFTFSPSWMGWFRQAPGKEREWVASVLRGGYTWYADSVKGRFTISADNSKNTAYLQMNSLKPEDTAVYYCTTEGFDPWGQGTLVTVSS

SEQ ID NO: 3004 - protein, 121 aa, synthetic construct
EVQLVESGGGLVQPGGSLRLSCAASGFSFDDYVMGWFRQAPGKEREFVAAISMSGGYTHYADSVKGRFTISADNSKNTAYLQMNSLKPEDTAVYYCAREGYYGSGSYLVYWGQGTLVTVSS

SEQ ID NO: 3005 - protein, 121 aa, synthetic construct
EVQLVESGGGLVQPGGSLRLSCAASGSIFSGNTMGWFRQAPGKEREFVAAISWSGAYTEYADSVKGRFTISADNSKNTAYLQMNSLKPEDTAVYYCAREGYYGSGSYLVYWGQGTLVTVSS

SEQ ID NO: 3006 - protein, 120 aa, synthetic construct
EVQLVESGGGLVQPGGSLRLSCAASGSIFSSNWMGWFRQAPGKEREMVAAIDWSGGSALYADSVKGRFTISADNSKNTAYLQMNSLKPEDTAVYYCAKDALSNSARFDHWGQGTLVTVSS

SEQ ID NO: 3007 - protein, 120 aa, synthetic construct
EVQLVESGGGLVQPGGSLRLSCAASGFTLSGNWMGWFRQAPGKEREMVAAIDWSGGSALYADSVKGRFTISADNSKNTAYLQMNSLKPEDTAVYYCAKDALSNSARFDHWGQGTLVTVSS

SEQ ID NO: 3008 - protein, 116 aa, synthetic construct
EVQLVESGGGLVQPGGSLRLSCAASGSIFSGNVMGWFRQAPGKERELVAAISNSASSTVYADSVKGRFTISADNSKNTAYLQMNSLKPEDTAVYYCARDWNLFDYWGQGTLVTVSS

SEQ ID NO: 3009 - protein, 116 aa, synthetic construct
EVQLVESGGGLVQPGGSLRLSCAASGSIFSGNAMGWFRQAPGKERELVAAISNSASSTVYADSVKGRFTISADNSKNTAYLQMNSLKPEDTAVYYCARDWNLFDYWGQGTLVTVSS

SEQ ID NO: 3010 - protein, 111 aa, synthetic construct
EVQLVESGGGLVQPGGSLRLSCAASGFIGNYHAMGWFRQAPGKEREFVARITSGGSTYYADSVKGRFTISADNSKNTAYLQMNSLKPEDTAVYYCGGFGNWGQGTLVTVSS

SEQ ID NO: 3011 - protein, 122 aa, synthetic construct
EVQLVESGGGLVQPGGSLRLSCAASGPTLGSYVMGWFRQAPGKEREFVAAISGSGDDTYYADSVKGRFTISADNSKNTAYLQMNSLKPEDTAVYYCARWREFPGYYFAIDVWGQGTLVTVSS

SEQ ID NO: 3012 - protein, 122 aa, synthetic construct
EVQLVESGGGLVQPGGSLRLSCAASGPTLGSYVTGWFRQAPGKEREFVAAISGSSDDTYYADSVKGRFTISADNSKNTAYLQMNSLKPEDTAVYYCARWREFPGYYFAIDVWGQGTLVTVSS

SEQ ID NO: 3013 - protein, 123 aa, synthetic construct
EVQLVESGGGLVQPGGSLRLSCAASGDTSEIYDMGWFRQAPGKEREFVAITWNSGRIGSNGFATYADSVKGRFTISADNSKNTAYLQMNSLKPEDTAVYYCARWAVGQAFDLWGQGTLVTVSS

SEQ ID NO: 3014 - protein, 124 aa, synthetic construct
EVQLVESGGGLVQPGGSLRLSCAASGFTLENNMMGWFRQAPGKEREFVAAISASGTLRAYADSVKGRFTISADNSKNTAYLQMNSLKPEDTAVYYCATWRPNRGRYYDWYFDLWGQGTLVTVSS

SEQ ID NO: 3015 - protein, 121 aa, synthetic construct
EVQLVESGGGLVQPGGSLRLSCAASGFTLENNMMGWFRQAPGKEREFVAAISASGTLRAYADSVKGRFTISADNSKNTAYLQMNSLKPEDTAVYYCACGRVSGAFIYFDYWGQGTLVTVSS

SEQ ID NO: 3016 - protein, 126 aa, synthetic construct
EVQLVESGGGLVQPGGSLRLSCAASGFTLENNMMGWFRQAPGKEREFVAAISASGTLRAYADSVKGRFTISADNSKNTAYLQMNSLKPEDTAVYYCARWYRVNNWSPGYYYYMDVWGQGTLVTVSS

SEQ ID NO: 3017 - protein, 119 aa, synthetic construct
EVQLVESGGGLVQPGGSLRLSCAASGFAFGDSWMGWFRQAPGKEREWVASVLRGGTLRAYAVSVKGRFTISADNSKNAAYLQMNSLKPEDTAVYYCARASIVGTTTLVWGQGTLVTVSS

SEQ ID NO: 3018 - protein, 120 aa, synthetic construct
EVQLVESGGGLVQPGGSLRLSCAASGFTLENNMMGWFRQAPGKEREFVAAISRSGTLKAYADSVKGRFTISADNSKNTAYLQMNSLKPEDTAVYYCARGGELTTFYFGYWGQGTLVTVSS

SEQ ID NO: 3019 - protein, 116 aa, synthetic construct
EVQLVESGGGLVQPGGSLRLSCAASGFTLENNMMGWFRQAPGKEREFVAAISRSGTLKAYADSVKGRFTISADNSKNTAYLQMNSLKPEDTAVYYCSLVSGPRWYWGQGTLVTVSS

SEQ ID NO: 3020 - protein, 125 aa, synthetic construct
EVQLVESGGGLVQPGGSLRLSCAASGFTLENNMMGWFRQAPGKGREFVAAISRSGTLKAYADSVKGRFTISADNSKNTAYLQMNSLKPEDTAVYYCARVRYYYDSSGYFFWFDLWGQGTLVTVSS

SEQ ID NO: 3021 - protein, 119 aa, synthetic construct
EVQLVESGGGLVQPGGSLRLSCAASGFTLENNMMGWFRQAPGKEREFVAAISRSGTLKAYADSVKGRFTISADNSKNTAYLRMNSLKPEDTAVYYCAGLTSGGAFSYYWGQGTLVTVSS

SEQ ID NO: 3022 - protein, 129 aa, synthetic construct
EVQLVESGGGLVQPGGSLRLSCAASGNTFSGGFTFDRSWMGWFRQAPGKEREWVASVLRGGYTWYADSVKGRFTISADNSKNTAYLQMNSLKPEDTAVYYCAGDRYYDFWSGPNSGDYWGQGTLVTVSS

SEQ ID NO: 3023 - protein, 121 aa, synthetic construct
EVQLVESGGGLVQPGGSLRLSCAASGNAFSSSVMGWFRQAPGKEREFVAGIWRSGSLKAYADSVKGRFTISADNSKNTAYLQMNSLRPEDTAVYYCARAYVGMTTVTFDHWGQGTLVTVSS

SEQ ID NO: 3024 - protein, 120 aa, synthetic construct
EVQLVESGGGLVQPGGSLRLSCAASGFSFDRWAMGWFRQAPGKEREFVAAIGWSGNLKAYADSVKGRFTISADNSKNTAYLQMNSLKPEDTAVYYCASGDGYSMDYFDPWGQGTLVTVSS

SEQ ID NO: 3025 - protein, 122 aa, synthetic construct
EVQLVESGGGLVQPGGSLRLSCAASGFTLGYYVMGWFRQAPGKEREFVAAISASGTLRAYADSVEGRFTISADNSKNTAYLQMNSLKPEDTAVYYCARAELGYSYGSVDGYWGQGTLVTVSS

SEQ ID NO: 3026 - protein, 119 aa, synthetic construct
EVQLVESGGGLVQPGGSLRLSCAASGFTLENNMMGWFRQAPGKEREFVAAISPSGTLRAYADSVKGRFTISADNSKNTAYLQMNSLKPEDTAVYYCAGIHDSGVPLGNWGQGTLVTVSS

SEQ ID NO: 3027 - protein, 125 aa, synthetic construct
EVQLVESGGGLVQPGGSLRLSCAASGNTFSGGFTLGYYVMGWFRQAPGKEREFVAAISRSGTLKAYADGVKGRFTISADNSKNTAYLQMNSLKPEDTAVYYCARVEAYGDPLGYWGQGTLVTVSS

SEQ ID NO: 3028 - protein, 122 aa, synthetic construct
EVQLVESGGGLVQPGGGLRLSCAASGFTLENNMMGWFRQAPGKEREFVAAISASGTLRAYADSVKGRFTISADNSKNTAYLQMNSLKPEDTAVYYCAKGGQAGPMAFYFDYWGQGTLVTVSS

SEQ ID NO: 3029 - protein, 124 aa, synthetic construct
EVQLVESGGGLVQPGGSLRLSCAASGTITSAVFMGWFRQAPGKEREFVAAVIWRGGSLKSYADSVKGRFTISADNSKNTAYLQMNSLKPEDTAVYYCAKLAVAGNYYYYGMDVWGQGTLVTVSS

SEQ ID NO: 3030 - protein, 125 aa, synthetic construct
EVQLVESGGGLVQPGGSLRLSCAASGDIGSINAMGWFRQAPGKEREFVAGIWRSGNLKAYADSVKGRFTISADNSKNTAYLQMSSLKPEDTAVYYCARGNIVVVPAAFVIWFDPWGQGTLVTVSS

SEQ ID NO: 3031 - protein, 127 aa, synthetic construct
EVQLVESGGGLVQPGGSLRLSCAASGFTLENNMMGWFRQAPGKEREFVAAISRSGTLKAYADSVKGRFTISADNSKNTAYLQMNSLKPEDTAVYYCAKVQGPYCSGGSCYLYTFDLWGQGTLVTVSS

SEQ ID NO: 3032 - protein, 120 aa, synthetic construct
EVQLVESGGGLVQPGGSLRLSCAASGFTLENNMMGWFRQAPGKEREFVAAISRSGTLKAYADSVKGRFTISADNSKNTAYLQVNSLKPEDTAVYYCVRVRGYSGYDCDYWGQGTLVTVSS

SEQ ID NO: 3033 - protein, 119 aa, synthetic construct
EVQLVESGGGLVQPGGSLRLSCAASGFPFSIYPMGWFRQAPGKEREFVAAISASGTLRAYADSVKGRFTISADNSKNTAYLQMNSLKPEDTAVYYCARSSSWVRIFDYWGQGTLVTVSS

SEQ ID NO: 3034 - protein, 123 aa, synthetic construct
EVQLVESGGGLVQPGGNLRLSCAASGSTFSKHHAMGWFRQAPGKEREFVAGIIRSGTLKAYADSVKGRFTISADNSKNTAYLQMNSLKPEDTAVYYCTRGRAARHNLWYFDLWGQGTLVTVSS

SEQ ID NO: 3035 - protein, 124 aa, synthetic construct
EVQLVESGGGLVQPGGSLRLSCAASGNTFSGGFMGWFRQAPGKEREWVASVLRGGYTWYADSVKGRFTISADNSKNTAYLQMNSLKPEDTAVYYCARAGGCSGTSCYDGWFDPWGQGTLVTVSS

SEQ ID NO: 3036 - protein, 119 aa, synthetic construct
EVQLVESGGGLVQPGGSLRLSCAASGFAFSSDWMGWFRQAPGKEREWVASVLRGGYTWYADSVKGRFTISADNSKNTAYLQMNSLKPEDTAVYYCAGDYRGFEMAFDPWGQGTLVTVSS

SEQ ID NO: 3037 - protein, 119 aa, synthetic construct
EVQLVESGGGLVQPGGSLRLSCAASGNTFSGGFMGWFRQAPGKEREWVASVLRGGYTWYADSVKGRFTISADNSKNTAYLQMNSLKPEDTAVYYCAGDYRGFEMAFDPWGQGTLVTVSS

SEQ ID NO: 3038 - protein, 120 aa, synthetic construct
EVQLVESGGGLVQPGGSLRLSCAASGNTFSGGFMGWFRQAPGKEREWVASVLRGGYTWYADSVKGRFTISADNSKNTAYLQMNSLKPEDTAVYYCTTEGYDFWSGYYDYWGQGTLVTVSS

SEQ ID NO: 3039 - protein, 120 aa, synthetic construct
EVQLVESGGGLVQPGGSLRLSCAASGFTFSPSWMGWFRQAPGKEREWVASVLRGGYTWYADSVKGRFTISADNSKNTAYLQMNSLKPEDTAVYYCTTEGYDFWSGYYDYWGQGTLVTVSS

SEQ ID NO: 3040 - protein, 119 aa, synthetic construct
EVQLVESGGGLVQPGGSLRLSCAASGFTFSPSWMGWFRQAPGKEREWVASVLRGGYTWYADSVKGRFTISADNSKNTAYLQMNSLKPEDTAVYYCAREGRSSSPWFDPWGQGTLVTVSS

SEQ ID NO: 3041 - protein, 119 aa, synthetic construct
EVQLVESGGGLVQPGGSLRLSCAASGFTFDRSWMGWFRQAPGKEREWVASVLRGGYTWYADSVKGRFTISADNSKNTAYLQMNSLKPEDTAVYYCAREGRSSSPWFDPWGQGTLVTVSS

SEQ ID NO: 3042 - protein, 119 aa, synthetic construct
EVQLVESGGGLVQPGGSLRLSCAASGNTFSGGFMGWFRQAPGKEREWVASVLRGGYTWYADSVKGRFTISADNSKNTAYLQMNSLKPEDTAVYYCAREGRSSSPWFDPWGQGTLVTVSS

SEQ ID NO: 3043 - protein, 120 aa, synthetic construct
EVQLVESGGGLVQPGGSLRLSCAASGFTFSPSWMGWFRQAPGKEREWVASVLRGGYTWYADSVKGRFTISADNSKNTAYLQMNSLKPEDTAVYYCTTDRAIGVRPLFDHWGQGTLVTVSS

SEQ ID NO: 3044 - protein, 120 aa, synthetic construct
EVQLVESGGGLVQPGGSLRLSCAASGNTFSGGFMGWFRQAPGKEREWVASVLRGGYTWYADSVKGRFTISADNSKNTAYLQMNSLKPEDTAVYYCTTDRAIGVRPLFDHWGQGTLVTVSS

SEQ ID NO: 3045 - protein, 117 aa, synthetic construct
EVQLVESGGGLVQPGGSLRLSCAASGFTFDRSWMGWFRQAPGKEREWVASVLRGGYTWYADSVKGRFTISADNSKNTAYLQMNSLKPEDTAVYYCATDKRGPHPDYWGQGTLVTVSS

SEQ ID NO: 3046 - protein, 115 aa, synthetic construct
EVQLVESGGGLVQPGGSLRLSCAASGFTFDRSWMGWFRQAPGKEREFVASVLRGGYTWYADSVKGRFTISADNSKNTAYLQMNSLKPEDTAVYYCTTEGSGWRNWGQGTLVTVSS

SEQ ID NO: 3047 - protein, 115 aa, synthetic construct
EVQLVESGGGLVQPGGSLRLSCAASGNTFSGGFMGWFRQAPGKEREWVASVLRGGYTWYADSVKGRFTISADNSKNTAYLQMNSLKPEDTAVYYCTTEGSGWRNWGQGTLVTVSS

SEQ ID NO: 3048 - protein, 117 aa, synthetic construct
EVQLVESGGGLVQPGGSLRLSCAASGFTFDRSWMGWFRQAPGKEREWVASVLRGGYTWYADSVKGRFTISADNSKNTAYLQMNSLKPEDTAVYYCAREGSGYASDYWGQGTLVTVSS

SEQ ID NO: 3049 - protein, 115 aa, synthetic construct
EVQLVESGGGLVQPGGSLRLSCAASGRTFSFMGWFRQAPGKEREWVASVLRGGYTWYADSVKGRFTISADNSKNTAYLQMNSLKPEDTAVYYCAREGSGYASDYWGQGTLVTVSS

SEQ ID NO: 3050 - protein, 117 aa, synthetic construct
EVQLVESGGGLVQPGGSLRLSCAASGFTFDRSWMGWFRQAPGKEREWVASVLRGGYAWYADSVKGRFTISADNSKNTAYLQMSSLKPEDTAVYYCAREGSGYASDYWGQGTLVTVSS

SEQ ID NO: 3051 - protein, 120 aa, synthetic construct
EVQLVESGGGLVQPGGSLRLSCAASGFTLNDYAMGWFRQAPGKERELVAWIARYDGSTLYADSVKGRFTISADNSKNTAYLQMNSLKPEDTAVYYCTTELRWELQQPDYWGQGTLVTVSS

SEQ ID NO: 3052 - protein, 119 aa, synthetic construct
EVQLVESGGGLVQPGGSLRLSCAASGHTFSPSWMGWFRQAPGKEREWVASVLRGGYTWYADSVKGRFTISADNSKNTAYLQMNSLKPEDTAVYYCTTELRWELQQPDYWGQGTLVTVSS

SEQ ID NO: 3053 - protein, 114 aa, synthetic construct
EVQLVESGGGLVQPGGSLRLSCAASGFTFDRSWMGWFRQAPGKEREWVASVLRGGYTWYADSVKGRFTISADNSKNTAYLQMNSLKPEDTAVYYCATERRLGVWGQGTLVTVSS

SEQ ID NO: 3054 - protein, 114 aa, synthetic construct
EVQLVESGGGLVQPGGSLRLSCAASGFTFSPSWMGWFRQAPGKEREWVASVLRGGYTWYADSVKGRFTISADNSKNTAYLQMNSLKPEDTAVYYCATERRLGVWGQGTLVTVSS

SEQ ID NO: 3055 - protein, 114 aa, synthetic construct; identical to SEQ ID NO: 3054

SEQ ID NO: 3056 - protein, 119 aa, synthetic construct
EVQLVESGGGLVQPGGSLRLSCAASGFLFDSYAMGWFRQAPGKEREFVAAISWSGGSTYYADSVKGRFTISADNSKNTAYLQMNSLKPEDTAVYYCTTDALRFLEWPWWGQGTLVTVSS

SEQ ID NO: 3057 - protein, 118 aa, synthetic construct
EVQLVESGGGLVQPGGSLRLSCAASGNTFSGGFMGWFRQAPGKEREWVASVLRGGYTWYADSVKGRFTISADNSKNTAYLQMNSLKPEDTAVYYCTTDALRFLEWPWWGQGTLVTVSS

SEQ ID NO: 3058 - protein, 118 aa, synthetic construct
EVQLVESGGGLVQPGGSLRLSCAASGFTFSPSWMGWFRQAPGKEREWVASVLRGGYTWYADSVKGRFTISADNSKNTAYLQMNSLKPEDTAVYYCVHEDSVAAHFDFWGQGTLVTVSS

SEQ ID NO: 3059 - protein, 118 aa, synthetic construct
EVQLVESGGGLVQPGGSLRLSCAASGFTFSPSWMGWFRQAPGKEREWVASVLRGGYTWYADSVKGRFTISADNSKNTAYLQMNSLKPEDTAVYYCATDRGPAMVFNLWGQGTLVTVSS

SEQ ID NO: 3060 - protein, 117 aa, synthetic construct
EVQLVESGGGLVQPGGSLRLSCAASGFTLSPSWMGWFRQAPGKEREWVASVLRGGYTWYADSVKGRFTISADNSKNTAYLQMNSLKPEDTAVYYCASEVASGETDYWGQGTLVTVSS

SEQ ID NO: 3061 - protein, 117 aa, synthetic construct
EVQLVESGGGLVQPGGSLRLSCAASGFTFSPSWMGWFRQAPGKEREWVASVLRGGYTWYADSVKGRFTISADNSKNTAYLQMNSLKPEDTAVYYCASEVASGETDYWGQGTLVTVSS

SEQ ID NO: 3062 - protein, 118 aa, synthetic construct
EVQLVESGGGLVQPGGSLRLSCAASGFTLNDYAMGWFRQAPGKERELVAWIARYDGSTLYADSVKGRFTISADNSKNTAYLQMNSLKPEDTAVYYCASEVASGETDYWGQGTLVTVSS

SEQ ID NO: 3063 - protein, 115 aa, synthetic construct
EVQLVESGGGLVQPGGSLRLSCAASGFTLSSNWMGWFRQAPGKEREFVASVLRGGYTWYADSVKGRFTISADNSKNTAYLQMNSLKPEDTAVYYCARDAYYYGLWGQGTLVTVSS

SEQ ID NO: 3064 - protein, 117 aa, synthetic construct
EVQLVESGGGLVQPGGSLRLSCAASGFTFSSSSMGWFRQAPGKEREFVAAINWSGGSTSYADSVKGRFTISADNSKNTAYLQMNSPKPEDTAVYYCAKDRSYSFDYWGQGTLVTVSS

SEQ ID NO: 3065 - protein, 116 aa, synthetic construct
EVQLVESGGGLVQPGGSLRLSCAASGFAFGDSWMGWFRQAPGKEREWVASVLRGGYTWYADSVKGRFTISADNSKNTAYLQMNSLKPEDTAVYYCAKDRSYSFDYWGQGTLVTVSS

SEQ ID NO: 3066 - protein, 117 aa, synthetic construct
EVQLVESGGGLVQPGGSLRLSCAASGFTFSPSWMGWFRQAPGKEREWVASVLRGGYTWYADSVKGRFTISADNSKNTAYLQMNSLKPEDTAVYYCTTDRGYNWNYDWGQGTLVTVSS

SEQ ID NO: 3067 - protein, 115 aa, synthetic construct
EVQLVESGGGLVQPGGSLRLSCAASGRTFSFMGWFRQAPGKEREWVASVLRGGYTWYADSVKGRFTISADNSKNTAYLQMNSLKPEDTAVYYCTTDRGYNWNYDWGQGTLVTVSS

SEQ ID NO: 3068 - protein, 117 aa, synthetic construct
EVQLVESGGGLVQPGGSLRLSCAASGNTFSGGFMGWFRQAPGKEREYVASVLRGGYTWYADSVKGRFTISADNSKNTTYLQMNSLKPEDTAVYYCTTDRGYNWNYDWGQGTLVTVSS

SEQ ID NO: 3069 - protein, 113 aa, synthetic construct
EVQLVESGGGLVQPGGSLRLSCAASGFTFSPSWMGWFRQAPGKEREWVASVLRGGYTWYADSVKGRFTISADNSKNTAYLQMNSLKPEDTAVYYCTTDSLPGWGQGTLVTVSS

SEQ ID NO: 3070 - protein, 113 aa, synthetic construct
EVQLVESGGGLVQPGGSLRLSCAASGNTFSGGFMGWFRQAPGKEREWVASVLRGGYTWYADSVKGRFTISADNSKNTAYLQMNSLKPEDTAVYYCTTDSLPGWGQGTLVTVSS

SEQ ID NO: 3071 - protein, 115 aa, synthetic construct
EVQLVESGGGLVQPGGSLRLSCAASGNTFSGGFMGWFRQAPGKEREWVASVLRGGYTWYADSVKGRFTISADNSKNTAYLQMNSLKPEDTAVYYCVTDVGAPDYWGQGTLVTVSS

SEQ ID NO: 3072 - protein, 115 aa, synthetic construct
EVQLVESGGGLVQPGGSLRLSCAASGFTFDRSWMGWFRQAPGKEREWVASVLRGGYTWYADSVKGRFTISADNSKNTAYLQMNSLKPEDTAVYYCVTDVGAPDYWGQGTLVTVSS

SEQ ID NO: 3073 - protein, 114 aa, synthetic construct
EVQLVESGGGLVQPGGSLRLSCAASGFVFSSDWMGWFRQAPGKEREWVASVLRGGYTWYADSVKGRFTISADNSKNTAYLQMNSLKPEDTAVYYCARGDSMDVWGQGTLVTVSS

SEQ ID NO: 3074 - protein, 120 aa, synthetic construct
EVQLVESGGGLVQPGGSLRLSCAASGFTFSVYWMGWFRQAPGKEREFVAAISRSGTLKEYADSVKGRFTISADNSKNTAYLQMNSLKPEDTAVYYCARGSGWPKIHFDYWGQGTLVTVSS

SEQ ID NO: 3075 - protein, 120 aa, synthetic construct
EVQLVESGGGLVQPGGSLRLSCAASGFTFSDYWMGWFRQAPGKEREFVAAISRSGTLKAYADSVKGRFTISADNSKNTAYLQMNSLKPEDTAVYYCARGSGWPKIHFDYWGQGTLVTVSS

SEQ ID NO: 3076 - protein, 115 aa, synthetic construct
EVQLVESGGGLVQPGGSLRLSCAASGFTFSDYWMGWFRQAPGKEREGVAWIARYDGSTLYADSVKGRFTISADNSKNTAYLQMNSLKPEDTAVYYCARGEGFDYWGQGTLVTVSS

SEQ ID NO: 3077 - protein, 114 aa, synthetic construct
EVQLVESGGGLVQPGGSLRLSCAASGFAFSSDWMGWFRQAPGKEREWVASVLRGGYTWYADSVKGRFTISADNSKNTAYLQMNSLKPEDTAVYYCARGEGFDYWGQGTLVTVSS

SEQ ID NO: 3078 - protein, 113 aa, synthetic construct
EVQLVESGGGLVQPGGSLRLSCAASGFAFSSDWMGWFRQAPGKEREWVASVLRGGYTWYADSVKGRFTISADNSKNTAYLQMNSLKPEDTAVYYCATEGLGYWGQGTLVTVSS

SEQ ID NO: 3079 - protein, 118 aa, synthetic construct
EVQLVESGGGLVQPGGSLRLSCAASGFTFDRSWMGWFRQAPGKEREWVASVLRGGYTWYADSVKGRFTISADNSKNTAYLQMNSLKPEDTAVYYCAREGRTAGWFDPWGQGTLVTVSS

SEQ ID NO: 3080 - protein, 114 aa, synthetic construct
EVQLVESGGGLVQPGGSLRLSCAASGFTFSPSWMGWFRQAPGKEREYVASVLRGGYTWYADSVKGRFTISADNSKNTAYLQMNSLKPEDTAVYYCASEGDPDYWGQGTLVTVSS

SEQ ID NO: 3081 - protein, 114 aa, synthetic construct
EVQLVESGGGLVQPGGSLRLSCAASGFSSAQYAMGWFRQAPGKERELVASIDSEGRTNYADSVKGRFTISADNSKNTAYLQMNSLKPEDTAVYYCTRDGGFDPWGQGTLVTVSS

SEQ ID NO: 3082 - protein, 114 aa, synthetic construct
EVQLVESGGGLVQPGGSLRLSCAASGNTFSGGFMGWFRQAPGKEREWVASVLRGGYTWYADSVKGRFTISADNSKNTAYLQMNSLKPEDTAVYYCTRDGGFDPWGQGTLVTVSS

SEQ ID NO: 3083 - protein, 114 aa, synthetic construct
EVQLVESGGGLVQPGGSLRLSCAASGFTFSPSWMGWFRQAPGKEREWVASVLRGGYTWYADSVKGRFTISADNSKNTAYLQMNSLKPEDTAVYYCTRDGGFDPWGQGTLVTVSS

SEQ ID NO: 3084 - protein, 119 aa, synthetic construct
EVQLVESGGGLVQPGGSLRLSCAASGFTFSPSWMGWFRQAPGKEREWVASVLRGGYTWYADSVKGRFTISADNSKNTAYLQMNSLKPEDTAVYYCTTDGGYSGIVGFAWGQGTLVTVSS

SEQ ID NO: 3085 - protein, 114 aa, synthetic construct
EVQLVESGGGLVQPGGSLRLSCAASGFTFSPSWMGWFRQAPGKEREWVASVLRGGYTWYADSVKGRFTISADNSKNTAYLQMNSLKPEDTAVYYCARDRGGSDWGQGTLVTVSS

SEQ ID NO: 3086 - protein, 119 aa, synthetic construct
EVQLVESGGGLVQPGGSLRLSCAASGFLFNSYWMVWFRQAPGKEREFVAAIWRSGTLKAYADSVKGRFTISADNSKNTAYLQMNSLKPEDTAVYYCAADVNYGSTWRNWGQGTLVTVSS

SEQ ID NO: 3087 - protein, 120 aa, synthetic construct
EVQLVESGGGLVQPGGSLRLSCAASGFTFDRSWMGWFRQAPGKEREFVAAIWRSGTLKAYADSVKGRFTISADNGKNTAYLQMNSLKPEDTAVYYCAEGGTTAWGWFVPWGQGTLVTVSS

SEQ ID NO: 3088 - protein, 121 aa, synthetic construct
EVQLVESGGGLVQPGGSLRLSCAASGFLFDSYVMGWFRQAPGKEREFVAAIWRSGTLKAYADSVKGRFTISADNSKNTAYLQMNGLKPEDTAVYYCAGVGTDYGDYLFNYWGQGTLVTVSS

SEQ ID NO: 3089 - protein, 121 aa, synthetic construct
EVQLVESGGGLVQPGGSLRLSCAASGFAFSSYVMGWFRQAPGKEREFVAAIWRSGTLKAYADSVKGRFTISADNSKNTEYLQMNSLKPEDTAVYYCARDDYGDTRRYFQHWGQGTLVTVSS

SEQ ID NO: 3090 - protein, 121 aa, synthetic construct
EVQLVESGGGLVQPGGSLRLSCAASGFLFDSYVMGWFRQAPGKEREFVAAIWRSGTLKAYADSVKGRFTISADNSKNTEYLQMNSLKPEDTAVYYCARDDYGDTRRYFQHWGQGTLVTVSS

SEQ ID NO: 3091 - protein, 121 aa, synthetic construct
EVQLVESGGGLVQPGGSLRLSCAASGFLFNSYWMGWFRQAPGKEREFVAAIWRSGTLKAYADSVKGRFTISADNSKNTEYLQMNSLKPEDTAVYYCARDDYGDYRIYFQHWGQGTLVTVSS

SEQ ID NO: 3092 - protein, 120 aa, synthetic construct
EVQLVESGGGLVQPGGSLRLSCAASGFLFDSYWMVWFRQAPGKEREFVAAIWRSGTLKAYADSVKGRFTISADNSKNTAYLQMNSLKPEDTAVYYCARDHRAMVAPFDYWGQGTLVTVSS

SEQ ID NO: 3093 - protein, 120 aa, synthetic construct
EVQLVESGGGLVQPGGSLRLSCAASGFSFSMYVMGWFRQAPGKEREFVAAIWRSGTLKAYADSVKGRFTISADNSKNTAYLQMNSLKPGDTAVYYCARDHRAMVAPFDYWGQGTLVTVSS

SEQ ID NO: 3094 - protein, 121 aa, synthetic construct
EVQLVESGGGLVQPGGSLRLSCAASGFLFDSYAMGWFRQAPGKEREFVAAIWRSGTLKAYADSVKGRFTISADNSKNTAYLQMNSLKPEDTAVYYCARWVGASGDYWIDYWGQGTLVTVSS

SEQ ID NO: 3095 - protein, 121 aa, synthetic construct
EVQLVESGGGLVQPGGSLRLSCAASGTFQRINAMGWFRQAPGKEREFVAAIWRSGTLKAYADSVKGRFTISADNSKNTAYLQMNSLKPEDTAVYYCARWVGASGDYWIDYWGQGTLVTVSS

SEQ ID NO: 3096 - protein, 119 aa, synthetic construct
EVQLVESGGGLVQPGGSLRLSCAASGFTFGDSWMGWFRQAPGKEHEFVAAIWRSGTLKAYADSVKGRFTISADNSKNTAYLQMNSLKPEDTAVYYCTSYDAVAGTRDFWGQGTLVTVSS
